(19) United States
(12) Patent Application Publication
(10) Pub. No.: US 2022/0356497 A1
(43) Pub. Date: Nov. 10, 2022

(54) COMPOSITIONS AND METHODS FOR SYNTHESIS OF TERPENOIDS

(71) Applicant: Zymergen Inc., Emeryville, CA (US)

(72) Inventors: Stefan DE KOK, Emeryville, CA (US); Warren LAU, Emeryville, CA (US); Fern MCSORLEY, Oakland, CA (US); Hermann-Josef MEYER, El Sobrante, CA (US); Zach SERBER, Sausalito, CA (US); Grayson WAWRZYN, Oakland, CA (US)

(21) Appl. No.: 17/622,619

(22) PCT Filed: Jun. 26, 2020
(86) PCT No.: PCT/US20/39959

§ 371 Date: Dec. 23, 2021

Related U.S. Application Data
(60) Provisional application No. 62/867,199, filed on Jun. 26, 2019.

(51) Int. Cl. C12P 17/06; C12P 5/00; C12N 1/18; C12N 15/81; C12N 15/52

(52) U.S. Cl. CPC C12P 17/06; C12P 5/007; C12N 1/18; C12N 15/81; C12N 15/52; C12Y 101/01324; C12Y 114/13169; C12Y 103/01; C12Y 101/01; C12N 2800/102

(57) ABSTRACT

The disclosure relates to the biosynthesis of terpenoids, such as, for example, geraniol and derivatives thereof, using genetic engineering. In particular, the disclosure relates to the biosynthesis of nepetalactol, nepetalactone, dihydronepetalactone, and derivatives thereof. The disclosure provides recombinant cells genetically engineered to produce high levels of nepetalactol, nepetalactone and/or dihydronepetalactone. The disclosure also provides methods of producing nepetalactol, nepetalactone and dihydronepetalactone using cell-based systems as well as cell-free systems.

### CROSS REFERENCE TO RELATED APPLICATIONS

[0001] The present application claims the benefit of priority to U.S. Provisional Application No. 62/867,199, filed on Jun. 26, 2019, the contents of which are hereby incorporated by reference in their entirety.

### TECHNICAL FIELD

[0002] The present disclosure is generally related to the biosynthesis of terpenoids, such as, for example, geraniol and derivatives thereof produced in microorganisms, using genetic engineering.

### INCORPORATION BY REFERENCE OF SEQUENCE LISTING

[0003] The contents of the text file named “ZYMR_041_01WO_SeqList_ST25.txt”, which was created on Jun. 26, 2020 and is 5.53 megabytes in size, are hereby incorporated by reference in its entirety.

### BACKGROUND

[0004] Dihydronepetalactone is an effective active ingredient for insect repellents. Current ingredients used for insect repellents such as N, N-Diethyl-meta-toluamide (DEET) pose health concerns, while other natural alternatives only offer short-term protection. Dihydronepetalactone and its direct precursor nepetalactone are derived primarily from Nepeta spp., but are produced at low levels with the latter being more abundant. Yields are subject to environmental factors, such as climate and pests, creating an unreliable supply for large-scale commercial use. Chemical synthesis is feasible, but not economical.

[0005] Thus far, attempts to synthesize nepetalactone and its derivatives using biosynthetic approaches have been met with several hurdles. First, the level of production of nepetalactone and its derivatives using biosynthetic approaches has been low. Second, it has not been possible thus far to produce nepetalactone and its derivatives in vivo using glucose as a precursor at industrial-scales or even lower levels. Third, the toxicity of monoterpenes presents additional challenges for the industrial-scale biosynthesis of nepetalactone and its derivatives in host cells. Finally, fermentation processes that would allow for rapid growth of host cells are needed to enable high-level production of nepetalactone and its derivatives. Therefore, there remains a pressing need to develop biosynthetic approaches that are capable of generating large quantities of nepetalactone and its derivatives in a commercially viable manner.

### SUMMARY

[0006] The disclosure provides recombinant microbial cell capable of producing nepetalactol from glucose without additional precursor supplementation.

[0007] The disclosure further provides methods for the production of nepetalactol from a glucose substrate, said method comprising: (a) providing any one of the recombinant microbial cells of this disclosure; and (b) cultivating the recombinant microbial cell in a suitable cultivation medium comprising glucose, thereby producing nepetalactol. The disclosure provides methods for the production of nepetalactone from a glucose substrate, said method comprising: (a) providing any one of the recombinant microbial cells of this disclosure; and (b) cultivating the recombinant microbial cell in a suitable cultivation medium comprising glucose, thereby producing nepetalactone. The disclosure also provides methods for the production of dihydronepetalactone from a glucose substrate, said method comprising: (a) providing a recombinant microbial cell according to any one of the recombinant microbial cells of this disclosure; and (b) cultivating the recombinant microbial cell in a suitable cultivation medium comprising glucose, thereby producing dihydronepetalactone.

[0008] The disclosure provides recombinant microbial cells capable of producing nepetalactone, wherein said recombinant microbial cell comprises a nucleic acid encoding for a heterologous nepetalactol oxidoreductase (NOR) enzyme that catalyzes the reduction of nepetalactol to nepetalactone. The disclosure provides methods for the production of nepetalactone, said method comprising: (a) providing any one of the recombinant microbial cells disclosed herein; (b) cultivating the recombinant microbial cell in a suitable cultivation medium; and (c) contacting the recombinant microbial cell with nepetalactol substrate to form nepetalactone.

[0009] The disclosure provides recombinant microbial cells capable of producing dihydronepetalactone, wherein said recombinant microbial cell comprises a nucleic acid encoding for a heterologous dihydronepetalactone dehydrogenase (DND) enzyme capable of converting nepetalactone to dihydronepetalactone. The disclosure provides method for the production of dihydronepetalactone, said method comprising: (a) providing any one of the recombinant microbial cells disclosed herein; (b) cultivating the recombinant microbial cell in a suitable cultivation medium; and (c) contacting the recombinant microbial cell with nepetalactone substrate to form dihydronepetalactone.

[0010] The disclosure provides a fermentation process for producing a desired product selected from the group consisting of nepetalactol, nepetalactone, and dihydronepetalactone, wherein said fermentation process utilizes a composition comprising a first phase and a second phase, wherein the first phase is an aqueous phase comprising a microbial cell capable of synthesizing the product, and wherein the second phase comprises an organic solvent and at least a portion of the desired product synthesized by the microbial cell. The disclosure further provides methods of producing a desired product selected from the group consisting of nepetalactol, nepetalactone, and dihydronepetalactone, said method comprising the steps of: a) growing an aqueous culture of microbial cells configured to produce the desired product in response to a chemical inducer, or absence of a chemical repressor; b) contacting the microbial cells with the chemical inducer or lack thereof a chemical repressor; and c) adding an organic solvent to the induced/derepressed aqueous culture, said organic solvent having low solubility with the aqueous culture, wherein product secreted by the microbial cells accumulates in the organic solvent, thereby reducing contact of the product with the microbial cells.

### BRIEF DESCRIPTION OF THE FIGURES

[0011] FIG. 1A shows a schematic of the mevalonate pathway, comprising the conversion of acetyl CoA to IPP/DMAPP through a series of enzymatically catalyzed steps.

[0012] FIGS. 1B and 1C show the nepetalactone biosynthetic pathway, comprising the conversion of IPP/DMAPP to 8-hydroxygeraniol (FIG. 1B) and from 8-hydroxygeraniol to nepetalactone through a series of enzymatically catalyzed steps (FIG. 1C). FIG. 1C also shows the conversion of nepetalactone to dihydronepetalactone by dihydronepetalactone dehydrogenase (DND).

[0013] FIGS. 2A-B show the conversion of nepetalactol to nepetalactone by candidate nepetalactol oxidoreductases (NORs). See Example 1. FIG. 2A shows nepetalactone produced in the presence of NAD+ (nicotinamide adenine dinucleotide, NAD) and/or NADP+ (nicotinamide adenine dinucleotide phosphate, NADP) in clarified cell lysates from cells expressing various candidate NORs. FIG. 2B shows the concentration of residual nepetalactol after reaction. The results show that three candidate NORs (NcatNOR15, NcatNOR21, and NcatNOR34) can convert nepetalactol to nepetalactone. (In FIGS. 2A-B, “uM” is used to refer to “μM.”)

[0014] FIG. 3 shows the in vitro conversion of 8-oxogeranial to nepetalactol in the presence of iridoid synthase (ISY, IS), NADH, and NADPH. The symbols for “IS reaction no cofactors” and “IS reaction no substrate” overlap for N mussinii. See Example 3.

[0015] FIG. 4 shows the in vitro conversion of 8-oxogeranial in the presence of iridoid synthase (ISY, IS), nepetalactol synthase (NEPS) and NADPH. Catharanthus roseus IS del22 is truncated at the N-terminus by 22 amino acids. (In FIG. 4, “ug” is used to refer to “μg.”). See Example 4.

[0016] FIG. 5 shows the in vitro conversion of 8-hydroxygeraniol to nepetalactol by 8HGOs coupled to Nepeta mussinii iridoid synthase (ISY) and C. roseus nepetalactol synthase (NEPS 1) in the presence of NAD+ and NADPH. The nepetalactol produced is cis,trans-nepetalactol, as determined by liquid chromatography-mass spectrometry (no other stereoisomers were detected by this method). (In FIG. 5, “ug” is used to refer to “μg.”). See Example 5.

[0017] FIG. 6 shows the titers of nepetalactol and nepetalactone in engineered strains compared to wild-type and a non-inoculated control. Geraniol or 8-hydroxygeraniol were provided as substrate feeds at a final concentration of 500 mg/L. Only the cis,trans-nepetalactone isomer was produced. Genotypes of tested strains are described in Table 10 of this document.

[0018] FIG. 7 shows the production of nepetalactone from nepetalactol in engineered Saccharomyces cerevisiae strains expressing NOR candidates from a 2p plasmid (pESCURA). See Example 6.

[0019] FIG. 8 shows an alignment of the amino acid sequences of nepetalactol cyclases (NEPSs) comprising the amino acid sequences of SEQ ID NO. 730-733.

[0020] FIG. 9 shows the results of a MUSCLE alignment of NOR enzymes comprising the amino acid sequences of SEQ ID NO 605, 718, 728, 1642-1644 and 520.

[0021] FIG. 10 depicts a distribution of three geraniol-derived terpenoids, geranic acid, nepetalactol, and nepetalactone from strains 7000445150 (see Example 9) and strains 7000552966 & 7000553262 (see Example 10). The strains were grown using the biphasic fermentation process disclosed herein. The first strain, 7000445150, accumulates >1.5 g/L of geranic acid, >0.5 g/L nepetalactone, and <0.1 g/L nepetalactol. After a subsequent round of engineering, the two additional strains, 7000552966 & 7000553262, show <0.25 g/L of geranic acid, and >1 g/L of both nepetalactol and nepetalactone. Data shown here are the average of at least four replicates, with error bars indicating a 95% confidence interval.

[0022] FIG. 11 shows a schematic of the DXP/MEP pathway, comprising the conversion of pyruvate to IPP/DMAPP through a series of enzymatically catalyzed steps.

[0023] FIG. 12A shows the titers of geranic acid, nepetalactol and nepetalactone, and the combined titer of nepetalactol and nepetalactone in engineered strains compared to their parent strain (Parent). Gene deletions in the parent strain are indicated by ‘d’ in front of the gene name. Promoter insertions in the parent strain are indicated by ‘<’. For example, pTDH3<SWT21 indicates an insertion of the TDH3 promoter between the native SWT21 promoter and the coding sequence. FIG. 12B shows the titers of geranic acid, nepetalactol, nepetalactone, and the combined titer of nepetalactol and nepetalactone in engineered strains compared to a parent strain (Parent; parent strain is different from that shown in FIG. 12A). Engineered strains each contain an inserted gene cassette at a neutral locus. For example, ihol1: pGAL7<NCP1, indicates that a gene cassette with the GAL7 promoter driving the expression of the gene NCP1 was inserted at the ihol1 site, an intergenic region between HOL1 and a proximal gene.

### DETAILED DESCRIPTION

[0024] The disclosure provides recombinant microbial cells and methods for producing high levels of nepetalactol and/or nepetalactone through (a) extensive genetic manipulations strategically directed at increasing the flux to key metabolic nodes such as, acetoacetyl CoA and geranyl pyrophosphate (GPP); (b) reducing negative feedback and unwanted side products within the biosynthetic pathway; and (c) addition of heterologous enzymes capable of catalyzing multiple steps in the nepetalactol/nepetalactone synthesis pathway. Further, the disclosure also provides methods of converting nepetalactone to dihydronepetalactone based on the discovery of dihydronepetalactone dehydrogenase (DND) disclosed herein.

[0025] Additionally, the disclosure provides genetic solutions for dynamically controlling the expression of various heterologous enzymes in the recombinant microbial cells disclosed herein. These genetic switches provide tight control of the nepetalactol/nepetalactone/dihydronepetalactone synthesis pathway, allowing for induction under conditions that mitigate toxicity and are economical. The disclosure also provides a phased-fermentation process that allows for growth of the recombinant microbial cell of this disclosure to high cell density and provides conditions amenable for high-level production of nepetalactol/nepetalactone/dihydronepetalactone, while mitigating the toxicity of product accumulation.

### Definitions

[0026] As used herein, and in the appended claims, the singular forms “a”, “an”, and “the” include plural referents unless the context clearly dictates otherwise. Thus, for example, reference to “a protein” can refer to one protein or to mixtures of such protein, and reference to “the method” includes reference to equivalent steps and/or processes known to those skilled in the art, and so forth.

[0027] As used herein, the term “about” or “approximately” when preceding a numerical value indicates the value plus or minus a range of 10%, unless otherwise stated or otherwise evident by the context (except where such a range would exceed 100% of a possible value, or fall below 0% of a possible value, such as less than 0 expression, or more than 100% of available protein).

[0028] As used herein the terms “cellular organism” “microorganism” or “microbe” should be taken broadly. These terms are used interchangeably and include, but are not limited to, the two prokaryotic domains, Bacteria and Archaea, as well as certain eukaryotic fungi and protists. In some embodiments, the disclosure refers to the “microorganisms” or “cellular organisms” or “microbes” of lists/tables and figures present in the disclosure. This characterization can refer to not only the identified taxonomic genera of the tables and figures, but also the identified taxonomic species, as well as the various novel and newly identified or designed strains of any organism in said tables or figures. The same characterization holds true for the recitation of these terms in other parts of the Specification, including the Examples.

[0029] The term “prokaryotes” is art recognized and refers to cells which contain no nucleus or other cell organelles. The prokaryotes are generally classified in one of two domains, the Bacteria and the Archaea. The definitive difference between organisms of the Archaea and Bacteria domains is based on fundamental differences in the nucleotide base sequence in the 16S ribosomal RNA.

[0030] The term “Archaea” refers to a categorization of organisms of the division Mendosicutes, typically found in unusual environments and distinguished from the rest of the prokaryotes by several criteria, including the number of ribosomal proteins and the lack of muramic acid in cell walls. On the basis of ssrRNA analysis, the Archaea consist of two phylogenetically-distinct groups: Crenarchaeota and Euryarchaeota. On the basis of their physiology, the Archaea can be organized into three types: methanogens (prokaryotes that produce methane); extreme halophiles (prokaryotes that live at very high concentrations of salt (NaCl); and extreme (hyper) thermophilus (prokaryotes that live at very high temperatures). Besides the unifying archaeal features that distinguish them from Bacteria (i.e., no murein in cell wall, ester-linked membrane lipids, etc.), these prokaryotes exhibit unique structural or biochemical attributes which adapt them to their particular habitats. The Crenarchaeota consists mainly of hyperthermophilic sulfur-dependent prokaryotes and the Euryarchaeota contains the methanogens and extreme halophiles.

[0031] “Bacteria” or “eubacteria” refers to a domain of prokaryotic organisms. Bacteria include at least 11 distinct groups as follows: (1) Gram-positive (gram+) bacteria, of which there are two major subdivisions: (1) high G+C group (Actinomycetes, Mycobacteria, Micrococcus, others) (2) low G+C group (Bacillus, Clostridia, Lactobacillus, Staphylococci, Streptococci, Mycoplasmas); (2) Proteobacteria, e.g., Purple photosynthetic+non-photosynthetic Gram-negative bacteria (includes most “common” Gram-negative bacteria); (3) Cyanobacteria, e.g., oxygenic phototrophs; (4) Spirochetes and related species; (5) Planctomyces; (6) Bacteroides, Flavobacteria; (7) Chlamydia; (8) Green sulfur bacteria; (9) Green non-sulfur bacteria (also anaerobic phototrophs); (10) Radioresistant micrococci and relatives; (11) Thermotoga and Thermosipho thermophiles.

[0032] A “eukaryote” is any organism whose cells contain a nucleus and other organelles enclosed within membranes. Eukaryotes belong to the taxon Eukarya or Eukaryota. The defining feature that sets eukaryotic cells apart from prokaryotic cells (the aforementioned Bacteria and Archaea) is that they have membrane-bound organelles, especially the nucleus, which contains the genetic material, and is enclosed by the nuclear envelope.

[0033] The terms “genetically modified host cell,” “recombinant host cell,” and “recombinant strain” are used interchangeably herein and refer to host cells that have been genetically modified by the cloning and transformation methods of the present disclosure. Thus, the terms include a host cell (e.g., bacteria, yeast cell, fungal cell, CHO, human cell, etc.) that has been genetically altered, modified, or engineered, such that it exhibits an altered, modified, or different genotype and/or phenotype (e.g., when the genetic modification affects coding nucleic acid sequences of the microorganism), as compared to the naturally-occurring organism from which it was derived. It is understood that in some embodiments, the terms refer not only to the particular recombinant host cell in question, but also to the progeny or potential progeny of such a host cell.

[0034] The term “wild type”, abbreviated as “WT”, is a term of the art understood by skilled persons and means the typical form of an organism, strain, gene, protein, or characteristic as it occurs in nature as distinguished from mutant or variant forms. For example, a WT protein is the typical form of that protein as it occurs in nature. As another example, the term “wild-type microorganism” or “wild-type host cell” describes a cell that occurs in nature, i.e. a cell that has not been genetically modified.

[0035] The term “genetically engineered” may refer to any manipulation of a host cell's genome (e.g. by insertion, deletion, mutation, or replacement of nucleic acids). In some embodiments, the manipulation comprises rearrangement of nucleic acids such that a polynucleotide is moved from its native location to another non-native location.

[0036] The term “control” or “control host cell” refers to an appropriate comparator host cell for determining the effect of a genetic modification or experimental treatment. In some embodiments, the control host cell is a wild type cell. In other embodiments, a control host cell is genetically identical to the genetically modified host cell, save for the genetic modification(s) differentiating the treatment host cell.

[0037] As used herein, the term “allele(s)” means any of one or more alternative forms of a gene, all of which alleles relate to at least one trait or characteristic. In a diploid cell, the two alleles of a given gene occupy corresponding loci on a pair of homologous chromosomes.

[0038] As used herein, the term “locus” (loci plural) means a specific place or places or a site on a chromosome where for example a gene or genetic marker is found.

[0039] As used herein, the term “genetically linked” refers to two or more traits that are co-inherited at a high rate during breeding such that they are difficult to separate through crossing.

[0040] A “recombination” or “recombination event” as used herein refers to a chromosomal crossing over or independent assortment.

[0041] As used herein, the term “phenotype” refers to the observable characteristics of an individual cell, cell culture, organism, or group of organisms which results from the interaction between that individual's genetic makeup (i.e., genotype) and the environment.

[0042] As used herein, the term “chimeric” when describing a nucleic acid sequence or a protein sequence refers to a nucleic acid, or a protein sequence, that links at least two heterologous polynucleotides, or two heterologous polypeptides, into a single macromolecule, or that re-arranges one or more elements of at least one natural nucleic acid or protein sequence. For example, the term “chimeric” can refer to an artificial combination of two otherwise separated segments of sequence, e.g., by chemical synthesis or by the manipulation of isolated segments of nucleic acids by genetic engineering techniques.

[0043] As used herein, a “synthetic nucleotide sequence” or “synthetic polynucleotide sequence” is a nucleotide sequence that is not known to occur in nature or that is not naturally occurring. Generally, such a synthetic nucleotide sequence will comprise at least one nucleotide difference when compared to any other naturally occurring nucleotide sequence.

[0044] As used herein, the term “nucleic acid” refers to a polymeric form of nucleotides of any length, either ribonucleotides or deoxyribonucleotides, or analogs thereof. This term refers to the primary structure of the molecule, and thus includes double- and single-stranded DNA, as well as double- and single-stranded RNA. It also includes modified nucleic acids such as methylated and/or capped nucleic acids, nucleic acids containing modified bases, backbone modifications, and the like. The terms “nucleic acid” and “nucleotide sequence” are used interchangeably.

[0045] As used herein, the term “gene” refers to any segment of DNA associated with a biological function. Thus, genes include, but are not limited to, coding sequences and/or the regulatory sequences required for their expression. Genes can also include non-expressed DNA segments that, for example, form recognition sequences for other proteins. Genes can be obtained from a variety of sources, including cloning from a source of interest or synthesizing from known or predicted sequence information, and may include sequences designed to have desired parameters.

[0046] As used herein, the term “homologous” or “homologue” or “ortholog” is known in the art and refers to related sequences that share a common ancestor or family member and are determined based on the degree of sequence identity. The terms “homology,” “homologous,” “substantially similar” and “corresponding substantially” are used interchangeably herein. They refer to nucleic acid fragments wherein changes in one or more nucleotide bases do not affect the ability of the nucleic acid fragment to mediate gene expression or produce a certain phenotype. These terms also refer to modifications of the nucleic acid fragments of the instant disclosure such as deletion or insertion of one or more nucleotides that do not substantially alter the functional properties of the resulting nucleic acid fragment relative to the initial, unmodified fragment. It is therefore understood, as those skilled in the art will appreciate, that the disclosure encompasses more than the specific exemplary sequences. These terms describe the relationship between a gene found in one species, subspecies, variety, cultivar or strain and the corresponding or equivalent gene in another species, subspecies, variety, cultivar or strain. For purposes of this disclosure homologous sequences are compared. “Homologous sequences” or “homologues” or “orthologs” are thought, believed, or known to be functionally related. A functional relationship may be indicated in any one of a number of ways, including, but not limited to: (a) degree of sequence identity and/or (b) the same or similar biological function. Preferably, both (a) and (b) are indicated. Homology can be determined using software programs readily available in the art, such as those discussed in Current Protocols in Molecular Biology (F. M. Ausubel et al., eds., 1987) Supplement 30, section 7.718, Table 7.71. Some alignment programs are MacVector (Oxford Molecular Ltd, Oxford, U.K.), ALIGN Plus (Scientific and Educational Software, Pennsylvania) and AlignX (Vector NTI, Invitrogen, Carlsbad, Calif.). Another alignment program is Sequencher (Gene Codes, Ann Arbor, Mich.), using default parameters.

[0047] As used herein, the term “endogenous” or “endogenous gene,” refers to the naturally occurring gene, in the location in which it is naturally found within the host cell genome. In the context of the present disclosure, operably linking a heterologous promoter to an endogenous gene means genetically inserting a heterologous promoter sequence in front of an existing gene, in the location where that gene is naturally present. An endogenous gene as described herein can include alleles of naturally occurring genes that have been mutated according to any of the methods of the present disclosure.

[0048] As used herein, the term “exogenous” is used interchangeably with the term “heterologous,” and refers to a substance coming from some source other than its native source. For example, the terms “exogenous protein,” or “exogenous gene” refer to a protein or gene from a non-native source or location, and that have been artificially supplied to a biological system.

[0049] As used herein, the term “nucleotide change” refers to, e.g., nucleotide substitution, deletion, and/or insertion, as is well understood in the art. For example, mutations contain alterations that produce silent substitutions, additions, or deletions, but do not alter the properties or activities of the encoded protein or how the proteins are made.

[0050] As used herein, the term “protein modification” refers to, e.g., amino acid substitution, amino acid modification, deletion, and/or insertion, as is well understood in the art.

[0051] As used herein, the term “at least a portion” or “fragment” of a nucleic acid or polypeptide means a portion having the minimal size characteristics of such sequences, or any larger fragment of the full length molecule, up to and including the full length molecule. A fragment of a polynucleotide of the disclosure may encode a biologically active portion of a genetic regulatory element. A biologically active portion of a genetic regulatory element can be prepared by isolating a portion of one of the polynucleotides of the disclosure that comprises the genetic regulatory element and assessing activity as described herein. Similarly, a portion of a polypeptide may be 4 amino acids, 5 amino acids, 6 amino acids, 7 amino acids, and so on, going up to the full length polypeptide. The length of the portion to be used will depend on the particular application. A portion of a nucleic acid useful as a hybridization probe may be as short as 12 nucleotides; in some embodiments, it is 20 nucleotides. A portion of a polypeptide useful as an epitope may be as short as 4 amino acids. A portion of a polypeptide that performs the function of the full-length polypeptide would generally be longer than 4 amino acids.

[0052] Variant polynucleotides also encompass sequences derived from a mutagenic and recombinogenic procedure such as DNA shuffling. Strategies for such DNA shuffling are known in the art. See, for example, Stemmer (1994) PNAS 91:10747-10751; Stemmer (1994) Nature 370:389-391; Crameri et al. (1997) Nature Biotech. 15:436-438; Moore et al. (1997) J. Mol. Biol. 272:336-347; Zhang et al. (1997) PNAS 94:4504-4509; Crameri et al. (1998) Nature 391:288-291; and U.S. Pat. Nos. 5,605,793 and 5,837,458.

[0053] For PCR amplification of the polynucleotides disclosed herein, oligonucleotide primers can be designed for use in PCR reactions to amplify corresponding DNA sequences from cDNA or genomic DNA extracted from any organism of interest. Methods for designing PCR primers and PCR cloning are generally known in the art and are disclosed in Sambrook et al. (2001) Molecular Cloning: A Laboratory Manual (3^{rd} ed., Cold Spring Harbor Laboratory Press, Plainview, N.Y.). See also Innis et al., eds. (1990) PCR Protocols: A Guide to Methods and Applications (Academic Press, New York); Innis and Gelfand, eds. (1995) PCR Strategies (Academic Press, New York); and Innis and Gelfand, eds. (1999) PCR Methods Manual (Academic Press, New York). Known methods of PCR include, but are not limited to, methods using paired primers, nested primers, single specific primers, degenerate primers, gene-specific primers, vector-specific primers, partially-mismatched primers, and the like.

[0054] The term “primer” as used herein refers to an oligonucleotide which is capable of annealing to the amplification target allowing a DNA polymerase to attach, thereby serving as a point of initiation of DNA synthesis when placed under conditions in which synthesis of primer extension product is induced, i.e., in the presence of nucleotides and an agent for polymerization such as DNA polymerase and at a suitable temperature and pH. The (amplification) primer is preferably single stranded for maximum efficiency in amplification. Preferably, the primer is an oligodeoxyribonucleotide. The primer must be sufficiently long to prime the synthesis of extension products in the presence of the agent for polymerization. The exact lengths of the primers will depend on many factors, including temperature and composition (A/T vs. G/C content) of primer. A pair of bi-directional primers consists of one forward and one reverse primer as commonly used in the art of DNA amplification such as in PCR amplification.

[0055] As used herein, “promoter” refers to a DNA sequence capable of controlling the expression of a coding sequence or functional RNA. In some embodiments, the promoter sequence consists of proximal and more distal upstream elements, the latter elements often referred to as enhancers. Accordingly, an “enhancer” is a DNA sequence that can stimulate promoter activity, and may be an innate element of the promoter or a heterologous element inserted to enhance the level or tissue specificity of a promoter. Promoters may be derived in their entirety from a native gene, or be composed of different elements derived from different promoters found in nature, or even comprise synthetic DNA segments. It is understood by those skilled in the art that different promoters may direct the expression of a gene in different tissues or cell types, or at different stages of development, or in response to different environmental conditions. It is further recognized that since in most cases the exact boundaries of regulatory sequences have not been completely defined, DNA fragments of some variation may have identical promoter activity.

[0056] As used herein, the phrases “recombinant construct”, “expression construct”, “chimeric construct”, “construct”, and “recombinant DNA construct” are used interchangeably herein. A recombinant construct comprises an artificial combination of nucleic acid fragments, e.g., regulatory and coding sequences that are not found together in nature. For example, a chimeric construct may comprise regulatory sequences and coding sequences that are derived from different sources, or regulatory sequences and coding sequences derived from the same source, but arranged in a manner different than that found in nature. Such construct may be used by itself or may be used in conjunction with a vector. If a vector is used then the choice of vector is dependent upon the method that will be used to transform host cells as is well known to those skilled in the art. For example, a plasmid vector can be used. The skilled artisan is well aware of the genetic elements that must be present on the vector in order to successfully transform, select and propagate host cells comprising any of the isolated nucleic acid fragments of the disclosure. The skilled artisan will also recognize that different independent transformation events will result in different levels and patterns of expression (Jones et al., (1985) EMBO J. 4:2411-2418; De Almeida et al., (1989) Mol. Gen. Genetics 218:78-86), and thus that multiple events must be screened in order to obtain lines displaying the desired expression level and pattern. Such screening may be accomplished by Southern analysis of DNA, Northern analysis of mRNA expression, immunoblotting analysis of protein expression, or phenotypic analysis, among others. Vectors can be plasmids, viruses, bacteriophages, pro-viruses, phagemids, transposons, artificial chromosomes, and the like, that replicate autonomously or can integrate into a chromosome of a host cell. A vector can also be a naked RNA polynucleotide, a naked DNA polynucleotide, a polynucleotide composed of both DNA and RNA within the same strand, a poly-lysine-conjugated DNA or RNA, a peptide-conjugated DNA or RNA, a liposome-conjugated DNA, or the like, that is not autonomously replicating. As used herein, the term “expression” refers to the production of a functional end-product e.g., an mRNA or a protein (precursor or mature).

[0057] “Operably linked” means in this context, the sequential arrangement of the promoter polynucleotide according to the disclosure with a further oligo- or polynucleotide, resulting in transcription of said further polynucleotide.

[0058] The term “product of interest” or “biomolecule” as used herein refers to any product produced by microbes from feedstock. In some cases, the product of interest may be nepetalactol, nepetalactone, and/or dihydronepetalactone.

[0059] As used herein, the term “precursor” refers to a molecule or a chemical compound that is transformed into another molecule or chemical compound in the biosynthetic pathway that leads to the generation of the “product of interest”. For example, a “nepetalactol precursor” refers to a compound that precedes nepetalactol in the biosynthetic pathway that leads to the generation of nepetalactol, such as those depicted in FIGS. 1A, 1B and 1C; a “nepetalactone precursor” refers to a compound that precedes nepetalactone in the biosynthetic pathway that leads to the generation of nepetalactone, such as those depicted in FIGS. 1A, 1B and IC; and a “dihydronepetalactone precursor” refers to a compound that precedes dihydronepetalactone in the biosynthetic pathway that leads to the generation of dihydronepetalactone, such as those depicted in FIGS. 1A, 1B and 1C.

[0060] The term “carbon source” generally refers to a substance suitable to be used as a source of carbon for cell growth. Carbon sources include, but are not limited to, biomass hydrolysates, starch, sucrose, cellulose, hemicellulose, xylose, and lignin, as well as monomeric components of these substrates. Carbon sources can comprise various organic compounds in various forms, including, but not limited to polymers, carbohydrates, acids, alcohols, aldehydes, ketones, amino acids, peptides, etc. These include, for example, various monosaccharides such as glucose, dextrose (D-glucose), maltose, oligosaccharides, polysaccharides, saturated or unsaturated fatty acids, succinate, lactate, acetate, ethanol, etc., or mixtures thereof. Photosynthetic organisms can additionally produce a carbon source as a product of photosynthesis. In some embodiments, carbon sources may be selected from biomass hydrolysates and glucose. In some embodiments, carbon sources include glucose, sucrose, maltose, lactose, glycerol, and ethanol.

[0061] The term “feedstock” or “microbial feedstock” refers to the minimum amount of nutrients required to sustain the growth of a microorganism. In some embodiments, feedstock comprises a carbon source, such as biomass or carbon compounds derived from biomass. In some embodiments, a feedstock comprises nutrients other than a carbon source. In some embodiments, feedstock is a raw material, or mixture of raw materials, supplied to a microorganism or fermentation process from which other products can be made. In some embodiments, feedstock is used by a microorganism that produces a product of interest (e.g. small molecule, peptide, synthetic compound, fuel, alcohol, etc.) in a fermentation process. In some embodiments, a microbial feedstock does not comprise greater than 0.5% precursor molecules, as defined above.

[0062] The term “volumetric productivity” or “production rate” is defined as the amount of product formed per volume of broth per unit of time. Volumetric productivity can be reported in gram per liter per hour (g/L/h), where grams refer to the grams of product of interest, and liter is liters of culture medium.

[0063] The term “specific productivity” is defined as the rate of formation of the product. Specific productivity is herein further defined as the specific productivity in gram product per gram of cell dry weight (CDW) per hour (g/g CDW/h). Using the relation of CDW to OD₆₀₀ for the given microorganism specific productivity can also be expressed as gram product per liter culture medium per optical density of the culture broth at 600 nm (OD) per hour (g/L/h/OD).

[0064] The term “yield” is defined as the amount of product obtained per unit weight of raw material and may be expressed as g product per g substrate (g/g). Yield may be expressed as a percentage of the theoretical yield. “Theoretical yield” is defined as the maximum amount of product that can be generated per a given amount of substrate as dictated by the stoichiometry of the metabolic pathway used to make the product.

[0065] The term “titre” or “titer” is defined as the strength of a solution or the concentration of a substance in solution. For example, the titre of a product of interest (e.g. small molecule, peptide, synthetic compound, fuel, alcohol, etc.) in a fermentation broth is described as g of product of interest in solution per liter of culture broth (g/L).

[0066] The term “total titer” is defined as the sum of all product of interest produced in a process, including but not limited to the product of interest in solution, the product of interest in gas phase if applicable, and any product of interest removed from the process and recovered relative to the initial volume in the process or the operating volume in the process.

[0067] The term “mutant protein” or “recombinant protein” is a term of the art understood by skilled persons and refers to a protein that is distinguished from the WT form of the protein on the basis of the presence of amino acid modifications, such as, for example, amino acid substitutions, insertions and/or deletions.

[0068] Amino acid modifications may be amino acid substitutions, amino acid deletions and/or amino acid insertions. Amino acid substitutions may be conservative amino acid substitutions or non-conservative amino acid substitutions. A conservative replacement (also called a conservative mutation, a conservative substitution or a conservative variation) is an amino acid replacement in a protein that changes a given amino acid to a different amino acid with similar biochemical properties (e.g. charge, hydrophobicity and size). As used herein, “conservative variations” refer to the replacement of an amino acid residue by another, biologically similar residue. Examples of conservative variations include the substitution of one hydrophobic residue such as isoleucine, valine, leucine or methionine for another; or the substitution of one polar residue for another, such as the substitution of arginine for lysine, glutamic for aspartic acids, or glutamine for asparagine, and the like. Other illustrative examples of conservative substitutions include the changes of: alanine to serine; arginine to lysine; asparagine to glutamine or histidine; aspartate to glutamate; cysteine to serine; glutamine to asparagine; glutamate to aspartate; glycine to proline; histidine to asparagine or glutamine; isoleucine to leucine or valine; leucine to valine or isoleucine; lysine to arginine, glutamine, or glutamate; methionine to leucine or isoleucine; phenylalanine to tyrosine, leucine or methionine; serine to threonine; threonine to serine; tryptophan to tyrosine; tyrosine to tryptophan or phenylalanine; valine to isoleucine or leucine, and the like. The mutant peptides can be chemically synthesized, or the isolated gene can be site-directed mutagenized, or a synthetic gene can be synthesized and expressed in bacteria, yeast, baculovirus, tissue culture, and the like.

[0069] A “vector” is used to transfer genetic material into a target cell. Vectors include, but are not limited to, nucleic acid molecules that are single-stranded, double-stranded, or partially double-stranded; nucleic acid molecules that comprise one or more free ends, no free ends (e.g. circular); nucleic acid molecules that comprise DNA, RNA, or both; and other varieties of polynucleotides known in the art. One type of vector is a “plasmid,” which refers to a circular double stranded DNA loop into which additional DNA segments can be inserted, such as by standard molecular cloning techniques. Another type of vector is a viral vector, wherein virally-derived DNA or RNA sequences are present in the vector for packaging into a virus (e.g., retroviruses, adenoviruses, lentiviruses, and adeno-associated viruses). In embodiments, a viral vector may be replication incompetent. Viral vectors also include polynucleotides carried by a virus for transfection into a host cell. Certain vectors are capable of autonomous replication in a host cell into which they are introduced (e.g. bacterial vectors having a bacterial origin of replication and episomal mammalian vectors). Other vectors (e.g., non-episomal mammalian vectors) are integrated into the genome of a host cell upon introduction into the host cell, and thereby are replicated along with the host genome. Moreover, certain vectors are capable of directing the expression of genes to which they are operatively-linked. Such vectors are referred to herein as “expression vectors.” Common expression vectors of utility in recombinant DNA techniques are often in the form of plasmids.

[0070] As used herein “sequence identity” refers to the extent to which two optimally aligned polynucleotides or polypeptide sequences are invariant throughout a window of alignment of components, e.g. nucleotides or amino acids. An “identity fraction” for aligned segments of a test sequence and a reference sequence is the number of identical components which are shared by the two aligned sequences divided by the total number of components in the reference sequence segment, i.e. the entire reference sequence or a smaller defined part of the reference sequence. “Percent identity” is the identity fraction times 100. A comparison of sequences to determine the percent identity can be accomplished by a number of well-known methods, including for example by using mathematical algorithms, such as, for example, those in the BLAST suite of sequence analysis programs.

### Mevalonate and Nepetalatone Synthesis Pathways

[0071] The mevalonate pathway catalyzes the conversion of acetyl CoA to isopentenyl pyrophosphate (IPP) or DMAPP through a series of enzyme catalyzed reactions, as shown in the schematic in FIG. 1A. The enzymes involved in the mevalonate pathway are listed below in Table 1.

TABLE 1
Enzymes of the mevalonate pathway

| Enzyme | | | |
|---|---|---|---|
| abbreviation | Enzyme name | Substrate | Product |
| ERG10 | acetoacetyl-CoA thiolase | Acetyl CoA | Acetoacetyl-CoA |
| ERG13 | HMG-CoA synthase | Acetoacetyl-CoA | HMG-CoA |
| tHMG or HMG | HMG-CoA reductase | HMG-CoA | R-mevalonate |
| ERG12 | mevalonate kinase | R-mevalonate | Mevalonate-5-phosphate |
| ERG8 | phosphomevalonate kinase | Mevalonate-5- | R-mevalonate-5-pyrophosphate |
| | | phosphate | |
| ERG19 or MVD1 | diphosphomevalonate | R-mevalonate-5- | isopentenyl pyrophosphate (IPP) or |
| | decarboxylase | pyrophosphate | dimethylallyl pyrophosphate (DMAPP) |
| IDI | isopentenyl diphosphate isomerase | IPP/DMAPP | DMAPP/IPP |

[0072] The nepetalactone synthesis pathway catalyzes the conversion of precursor metabolites, dimethylallyl pyrophosphate (DMAPP) and isopentenyl pyrophosphate (IPP) into geranyl pyrophosphate and geraniol; the conversion of geraniol to 8-hydroxygeraniol; the conversion of 8-hydroxygeraniol to 8-oxogeranial (see FIG. 11B); the formation of an enol intermediate (8-oxocitronellyl enol) by iridoid synthase (ISY) and the cyclization of the enol intermediate into nepetalactol by nepetalactol synthase (NEPS) (see FIG. 1C). The cyclization of the enol intermediate has also been shown to occur spontaneously at trace levels. Nepetalactol is converted to nepetalactone by a previously uncharacterized oxidoreductase (nepetalactol oxidoreductase, NOR). The enzymes involved in the nepetalactone synthesis pathway are listed below in Table 2.

TABLE 2
Enzymes of the nepetalactone synthesis pathway

| Enzyme | | | |
|---|---|---|---|
| abbreviation | Enzyme name | Substrate | Product |
| GPPS or | geranyl diphosphate | IPP/DMAPP | Geranyl |
| ERG20^{ww} | synthase | | pyrophosphate |
| GES | geraniol synthase | Geranyl | Geraniol |
| | | pyrophosphate | |
| G8H; CPR; | geraniol-8- | Geraniol | 8- |
| CYB5 | hydroxylase; | | hydroxygeraniol |
| | cytochrome P450 | | |
| | reductase; | | |
| | cytochrome B5 | | |
| 8HGO | 8-hydroxygeraniol | 8- | 8-oxogeranial |
| | oxidoreductase | hydroxygeraniol | |
| ISY | iridoid synthase | 8-oxogeramal | Enol intermediate |
| NEPS | nepetalactol | Enol intermediate | Nepetalactol |
| | synthase | | |
| NOR | nepetalactol | Nepetalactol | Nepetalactone |
| | oxidoreductase | | |

[0073] Finally, the conversion of nepetalactone to dihydronepetalactone is catalyzed by dihydronepetalactone dehydrogenase (DND), as shown in FIG. 1C.

### Biosynthesis of Nepetalactol Using a Recombinant NEPS Enzyme

[0074] The disclosure provides recombinant microbial cells capable of producing nepetalactol. In some embodiments, the recombinant microbial cells produce nepetalactol from glucose or other comparable carbon sources, such as galactose, glycerol and ethanol. In some embodiments, the recombinant microbial cells produce nepetalactol from glucose without additional precursor supplementation. In some embodiments, the recombinant microbial cells produce nepetalactol from any one of the intermediate substrates of the mevalonate pathway and/or the nepetalactone synthesis pathway. For example, in some embodiments, the recombinant microbial cells produce nepetalactol when supplemented with any one or more of the substrates listed in Table 1 or Table 2. In some embodiments, the recombinant microbial cells of this disclosure comprise one or more polynucleotides encoding a heterologous nepetalactol synthase (NEPS).

[0075] Prior to this disclosure, the reconstitution of the enzymatic pathways required for the conversion of nepetalactol from glucose (without additional precursor supplementation) has not been shown in any microbial cell. Moreover, while the spontaneous conversion of an enol intermediate to small amounts of nepetalactol in vitro has been observed (Campbell, Alex, Thesis, 2016, the contents of which are incorporated herein by reference in its entirety), there have been no reports of enzymatically catalyzing the synthesis of nepetalactol in vivo using an NEPS enzyme. Finally, the function of NEPS in controlling the stereochemistry of cyclization in vivo has not been described prior to this disclosure. Identification of this function enables the development of methods of specifically producing one or more nepetalactol stereoisomers, such as, cis, trans-nepetalactol, trans, cis-nepetalactol, trans, trans-nepetalactol, and/or cis, cis-nepetalactol, as described in this disclosure.

[0076] In some embodiments, the recombinant microbial cells of this disclosure express a heterologous NEPS enzyme. In some embodiments, the NEPS enzyme comprises a Pfam domain pfam12697, which may be identified by any in silico analysis program known in the art for the identification of protein domains. In some embodiments, the NEPS enzyme belongs to a large superfamily of alpha/beta hydrolases. The presence of the Pfam domain pfam12697 distinguishes the NEPS enzymes disclosed herein from the NEPS enzymes described thus far (see, for e.g., Lichman et al., Nature Chemical Biology, Vol. 15 Jan. 2019, 71-79, the contents of which are incorporated herein by reference in its entirety), which do not contain this protein domain.

[0077] In some embodiments, the polynucleotide encoding a heterologous NEPS comprises a nucleic acid sequence of at least about 80% identity to a nucleic acid sequence selected from SEQ ID Nos 1506-1562. In some embodiments, the polynucleotide comprises a nucleic acid sequence having about 80%, about 81%, about 82%, about 83%, about 84%, about 85%, about 86%, about 87%, about 88%, about 89%, about 90%, about 91%, about 92%, about 93%, about 94%, about 95%, about 96%, about 97%, about 98%, about 99%, or about 100% identity to a nucleic acid sequence selected from SEQ ID Nos 1506-1562, including any ranges and subranges therebetween. In some embodiments, the polynucleotide consists of a nucleic acid sequence selected from SEQ ID Nos. 1506-1562.

[0078] In some embodiments, the NEPS enzymes of this disclosure exhibit cyclase activity, and thereby catalyze and enhance nepetalactol formation. In some embodiments, the NEPS enzyme comprises an amino acid sequence of at least about 80% identity to an amino acid sequence selected from SEQ ID Nos. 718-774. In some embodiments, the NEPS enzyme comprises an amino acid sequence having about 80%, about 81%, about 82%, about 83%, about 84%, about 85%, about 86%, about 87%, about 88%, about 89%, about 90%, about 91%, about 92%, about 93%, about 94%, about 95%, about 96%, about 97%, about 98%, about 99%, or about 100% identity to an amino acid sequence selected from SEQ ID Nos. 718-774, including any ranges and subranges therebetween. In some embodiments, the NEPS enzyme consists of an amino acid sequence selected from SEQ ID Nos. 718-774.

[0079] In some embodiments, the polynucleotide encoding a heterologous NEPS comprises a nucleic acid sequence of at least about 80% identity to a nucleic acid sequence selected from SEQ ID Nos 1518-1521. In some embodiments, the polynucleotide comprises a nucleic acid sequence having about 80%, about 81%, about 82%, about 83%, about 84%, about 85%, about 86%, about 87%, about 88%, about 89%, about 90%, about 91%, about 92%, about 93%, about 94%, about 95%, about 96%, about 97%, about 98%, about 99%, or about 100% identity to a nucleic acid sequence selected from SEQ ID Nos 1518-1521, including any ranges and subranges therebetween. In some embodiments, the polynucleotide consists of a nucleic acid sequence selected from SEQ ID Nos. 1518-1521.

[0080] In some embodiments, the NEPS enzyme comprises an amino acid sequence of at least about 80% identity to an amino acid sequence selected from SEQ ID Nos. 730-733. In some embodiments, the NEPS enzyme comprises an amino acid sequence having about 80%, about 81%, about 82%, about 83%, about 84%, about 85%, about 86%, about 87%, about 88%, about 89%, about 90%, about 91%, about 92%, about 93%, about 94%, about 95%, about 96%, about 97%, about 98%, about 99%, or about 100% identity to an amino acid sequence selected from SEQ ID Nos. 730-733, including any ranges and subranges therebetween. In some embodiments, the NEPS enzyme consists of an amino acid sequence selected from SEQ ID Nos. 730-733.

[0081] In some embodiments, the polynucleotide encoding a heterologous NEPS comprises a nucleic acid sequence of at least about 80% identity to a nucleic acid sequence selected from SEQ ID Nos 1508-1515. In some embodiments, the polynucleotide comprises a nucleic acid sequence having about 80%, about 81%, about 82%, about 83%, about 84%, about 85%, about 86%, about 87%, about 88%, about 89%, about 90%, about 91%, about 92%, about 93%, about 94%, about 95%, about 96%, about 97%, about 98%, about 99%, or about 100% identity to a nucleic acid sequence selected from SEQ ID Nos 1508-1515, including any ranges and subranges therebetween. In some embodiments, the polynucleotide consists of a nucleic acid sequence selected from SEQ ID Nos. 1508-1515.

[0082] In some embodiments, the NEPS enzyme comprises an amino acid sequence of at least about 80% identity to an amino acid sequence selected from SEQ ID Nos. 720-727. In some embodiments, the NEPS enzyme comprises an amino acid sequence having about 80%, about 81%, about 82%, about 83%, about 84%, about 85%, about 86%, about 87%, about 88%, about 89%, about 90%0, about 91%, about 92%, about 93%, about 94%, about 95%, about 96%, about 97%, about 98%, about 99%, or about 100% identity to an amino acid sequence selected from SEQ ID Nos. 720-727, including any ranges and subranges therebetween. In some embodiments, the NEPS enzyme consists of an amino acid sequence selected from SEQ ID Nos. 720-727.

[0083] In some embodiments, the polynucleotide encoding a heterologous NEPS comprises a nucleic acid sequence of at least about 80% identity to a nucleic acid sequence selected from SEQ ID Nos 1522-1562. In some embodiments, the polynucleotide comprises a nucleic acid sequence having about 80%, about 81%, about 82%, about 83%, about 84%, about 85%, about 86%, about 87%, about 88%, about 89%, about 90%, about 91%, about 92%, about 93%, about 94%, about 95%, about 96%, about 97%, about 98%, about 99%, or about 100% identity to a nucleic acid sequence selected from SEQ ID Nos 1522-1562, including any ranges and subranges therebetween. In some embodiments, the polynucleotide consists of a nucleic acid sequence selected from SEQ ID Nos. 1522-1562.

[0084] In some embodiments, the NEPS enzyme comprises an amino acid sequence of at least about 80% identity to an amino acid sequence selected from SEQ ID Nos. 734-774. In some embodiments, the NEPS enzyme comprises an amino acid sequence having about 80%, about 81%, about 82%, about 83%, about 84%, about 85%, about 86%, about 87%, about 88%, about 89%, about 90%, about 91%, about 92%, about 93%, about 94%, about 95%, about 96%, about 97%, about 98%, about 99%, or about 100% identity to an amino acid sequence selected from SEQ ID Nos. 734-774, including any ranges and subranges therebetween. In some embodiments, the NEPS enzyme consists of an amino acid sequence selected from SEQ ID Nos. 734-774.

[0085] In some embodiments, the heterologous NEPS enzyme is selected from the NEPS enzymes listed in Table 3.

TABLE 3
Exemplary NEPS enzymes for use in the methods disclosed herein

| SEQ ID | | |
|---|---|---|
| NO. | Enzyme Name | Source Organism |
| 718 | NEPS | Nepeta mussinii |
| 719 | NEPS | Nepeta mussinii |
| 720 | NEPS | Catharanthus roseus |
| 721 | NEPS | Camptotheca acuminata |
| 722 | NEPS | Vinca minor |
| 723 | NEPS | Rauvolfia serpentina |
| 724 | NEPS | Catharanthus roseus |
| 725 | NEPS | Camptotheca acuminata |
| 726 | NEPS | Vinca minor |
| 727 | NEPS | Rauvolfia serpentina |
| 728 | NEPS | Nepeta mussinii |
| 729 | NEPS | Nepeta mussinii |
| 730 | NEPS | Catharanthus roseus |
| 731 | NEPS | Camptotheca acuminata |
| 732 | NEPS | Vinca minor |
| 733 | NEPS | Rauvolfia serpentina |
| 734 | NEPS | Andrographis_{—}paniculata |
| 735 | NEPS | Gentiana triflora |
| 736 | NEPS | Coffea canephora |
| 737 | NEPS | Ophiorrhiza_{—}pumila |
| 738 | NEPS | Phelline_{—}lucida |
| 739 | NEPS | Vitex_{—}agnus_{—}castus |
| 740 | NEPS | Valeriana_{—}officianalis |
| 741 | NEPS | Stylidium_{—}adnatum |
| 742 | NEPS | Verbena_{—}hastata |
| 743 | NEPS | Byblis_{—}gigantea |
| 744 | NEPS | Pogostemon sp. |
| 745 | NEPS | Strychnos_{—}spinosa |
| 746 | NEPS | Corokia_{—}cotoneaster |
| 747 | NEPS | Oxera_{—}neriifolia |
| 748 | NEPS | Buddleja_sp. |
| 749 | NEPS | Gelsemium_{—}sempervirens |
| 750 | NEPS | Utricularia_sp. |
| 751 | NEPS | Scaevola_sp. |
| 752 | NEPS | Menyanthes_{—}trifoliata |
| 753 | NEPS | Pinguicula_{—}caudata |
| 754 | NEPS | Psychotria_{—}ipecacuanha |
| 755 | NEPS | Dipsacus_{—}sativum |
| 756 | NEPS | Exacum_{—}affine |
| 757 | NEPS | Chionanthus_{—}retusus |
| 758 | NEPS | Allamanda_{—}cathartica |
| 759 | NEPS | Phyla_{—}dulcis |
| 760 | NEPS | Ligustrum_{—}sinense |
| 761 | NEPS | Pyrenacantha_{—}malvifolia |
| 762 | NEPS | Sambucus_{—}canadensis |
| 763 | NEPS | Leonurus_{—}japonicus |
| 764 | NEPS | Ajuga_{—}reptans |
| 765 | NEPS | Paulownia_{—}fargesii |
| 766 | NEPS | Caiophora_{—}chuquitensis |
| 767 | NEPS | Plantago_{—}maritima |
| 768 | NEPS | Antirrhinum_{—}braun |
| 769 | NEPS | Cyrilla_{—}racemiflora |
| 770 | NEPS | Hydrangea_{—}quercifolia |
| 771 | NEPS | Cinchona pubescens |
| 772 | NEPS | Actinidia chinensis var. chinensis |
| 773 | NEPS | Swertia japonica |
| 774 | NEPS | Sesamum indicum |

[0086] In some embodiments, the recombinant microbial cells of this disclosure are capable of producing detectable quantities of nepetalactol. In some embodiments, the recombinant microbial cells of this disclosure are capable of producing detectable quantities of nepetalactol and its derivatives. In yet other embodiments, the recombinant microbial cells of this disclosure are capable of producing detectable quantities of nepetalactol and/or nepetalactone as an intermediate to other downstream products. In some embodiments, the methods and/or engineered microbes described herein are capable of producing nepetalactone and/or nepetalactol at a level of at least about: 0.01 g/L, 0.02 g/L, 0.03 g/L, 0.04 g/L, 0.05 g/L, 0.06 g/L, 0.07 g/L, 0.08 g/L, 0.09 g/L, 0.10 g/L, 0.20 g/L, 0.30 g/L, 0.40 g/L, 0.50 g/L, 0.60 g/L, 0.70 g/L, 0.80 g/L, 0.90 g/L, 1.00 g/L, 2.00 g/L, 3.00 g/L, 4.00 g/L, 5.00 g/L, 6.00 g/L, 7.00 g/L, 8.00 g/L, 9.00 g/L, 10.00 g/L, 20.00 g/L, 30.00 g/L, 40.00 g/L, 50.00 g/L, or more of cell lysate or culture medium. In some embodiments, the methods and/or engineered microbes described herein are capable of producing nepetalactone and/or nepetalactol at a level of at most about: 0.01 g/L, 0.02 g/L, 0.03 g/L, 0.04 g/L, 0.05 g/L, 0.06 g/L, 0.07 g/L, 0.08 g/L, 0.09 g/L, 0.10 g/L, 0.20 g/L, 0.30 g/L, 0.40 g/L, 0.50 g/L, 0.60 g/L, 0.70 g/L, 0.80 g/L, 0.90 g/L, 1.00 g/L, 2.00 g/L, 3.00 g/L, 4.00 g/L, 5.00 g/L, 6.00 g/L, 7.00 g/L, 8.00 g/L, 9.00 g/L, 10.00 g/L, 20.00 g/L, 30.00 g/L, 40.00 g/L, or 50.00 g/L of cell lysate or culture medium. In some embodiments, the methods and/or engineered microbes described herein are capable of producing nepetalactone and/or nepetalactol at a level between about: 0.01-50.00 g/L, 0.05-50.00 g/L, 0.10-50.00 g/L, 0.20-50.00 g/L, 0.30-50.00 g/L, 0.40-50.00 g/L, 0.50-50.00 g/L, 0.60-50.00 g/L, 0.70-50.00 g/L, 0.80-50.00 g/L, 0.90-50.00 g/L, 1.00-50.00 g/L, 5.00-50.00 g/L, 10.00-50.00 g/L, 15.00-50.00 g/L, 20.00-50.00 g/L, 25.00-50.00 g/L, 30.00-50.00 g/L, 35.00-50.00 g/L, 40.00-50.00 g/L, 0.01-40.00 g/L, 0.05-40.00 g/L, 0.10-40.00 g/L, 0.20-40.00 g/L, 0.30-40.00 g/L, 0.40-40.00 g/L, 0.50-40.00 g/L, 0.60-40.00 g/L, 0.70-40.00 g/L, 0.80-40.00 g/L, 0.90-40.00 g/L, 1.00-40.00 g/L, 5.00-40.00 g/L, 10.00-40.00 g/L, 15.00-40.00 g/L, 20.00-40.00 g/L, 25.00-40.00 g/L, 30.00-40.00 g/L, 0.01-30.00 g/L, 0.05-30.00 g/L, 0.10-30.00 g/L, 0.20-30.00 g/L, 0.30-30.00 g/L, 0.40-30.00 g/L, 0.50-30.00 g/L, 0.60-30.00 g/L, 0.70-30.00 g/L, 0.80-30.00 g/L, 0.90-30.00 g/L, 1.00-30.00 g/L, 5.00-30.00 g/L, 10.00-30.00 g/L, 15.00-30.00 g/L, 20.00-30.00 g/L, 0.01-20.00 g/L, 0.05-20.00 g/L, 0.10-20.00 g/L, 0.20-20.00 g/L, 0.30-20.00 g/L, 0.40-20.00 g/L, 0.50-20.00 g/L, 0.60-20.00 g/L, 0.70-20.00 g/L, 0.80-20.00 g/L, 0.90-20.00 g/L, 1.00-20.00 g/L, 5.00-20.00 g/L, 10.00-20.00 g/L, 0.01-10.00 g/L, 0.05-10.00 g/L, 0.10-10.00 g/L, 0.20-10.00 g/L, 0.30-10.00 g/L, 0.40-10.00 g/L, 0.50-10.00 g/L, 0.60-10.00 g/L, 0.70-10.00 g/L, 0.80-10.00 g/L, 0.90-10.00 g/L, 1.00-10.00 g/L, 5.00-10.00 g/L, 0.10-5.00 g/L, 0.20-5.00 g/L, 0.30-5.00 g/L, 0.40-5.00 g/L, 0.50-5.00 g/L, 0.60-5.00 g/L, 0.70-5.00 g/L, 0.80-5.00 g/L, 0.90-5.00 g/L, 1.00-5.00 g/L, 2.00-5.00 g/L, 3.00-5.00 g/L, 0.20-3.00 g/L, 0.30-3.00 g/L, 0.40-3.00 g/L, 0.50-3.00 g/L, 0.60-3.00 g/L, 0.70-3.00 g/L, 0.80-3.00 g/L, 0.90-3.00 g/L, 1.00-3.00 g/L, 2.00-3.00 g/L, 0.20-2.00 g/L, 0.30-2.00 g/L, 0.40-2.00 g/L, 0.50-2.00 g/L, 0.60-2.00 g/L, 0.70-2.00 g/L, 0.80-2.00 g/L, 0.90-2.00 g/L, or 1.00-2.00 g/L of cell lysate or culture medium.

[0087] In some embodiments, the recombinant microbial cells of this disclosure are capable of producing industrially relevant quantities of nepetalactol. In some embodiments, the recombinant microbial cells of this disclosure are capable of producing industrially relevant quantities of nepetalactol and its derivatives. In yet other embodiments, the recombinant microbial cells of this disclosure are capable of producing industrially relevant quantities of nepetalactol and/or nepetalactone as an intermediate to other downstream products. As used herein, “industrially relevant quantities” refer to amounts greater than about 0.25 gram per liter of fermentation or culture broth. In some embodiments, the recombinant microbial cells of this disclosure are capable of producing nepetalactol in an amount greater than about 0.25 gram per liter of fermentation or culture broth, for example, greater than about 0.5 gram per liter, greater than about 1 gram per liter, greater than about 5 gram per liter, greater than about 10 gram per liter, greater than about 15 gram per liter, greater than about 20 gram per liter, greater than about 25 gram per liter, greater than about 30 gram per liter, greater than about 35 gram per liter, greater than about 40 gram per liter, greater than about 45 gram per liter, greater than about 50 gram per liter, greater than about 60 gram per liter, greater than about 70 gram per liter, greater than about 80 gram per liter, greater than about 90 gram per liter, or greater than about 100 gram per liter of fermentation or culture broth, including all subranges and values that lie therebetween.

### Biosynthesis of Nepetalactone Using a Recombinant NOR Enzyme

[0088] The disclosure provides recombinant microbial cells capable of producing nepetalactone. In some embodiments, the recombinant microbial cells produce nepetalactone from glucose or other comparable carbon sources, such as galactose, glycerol and ethanol. In some embodiments, the recombinant microbial cells produce nepetalactone from glucose without additional precursor supplementation. In some embodiments, the recombinant microbial cells produce nepetalactone from any one of the intermediate substrates of the mevalonate pathway and/or the nepetalactone synthesis pathway. For example in some embodiments, the recombinant microbial cells produce nepetalactone when supplemented with any one or more of the substrates listed in Table 1 or Table 2. In some embodiments, the recombinant microbial cell of this disclosure comprise one or more polynucleotides encoding a heterologous nepetalactol oxidoreductase (NOR).

[0089] NOR is a previously uncharacterized enzyme; and the production of nepetalactone from its immediate precursor, nepetalactol, has not been demonstrated in vivo thus far, which underscores the novelty of the recombinant microbial cells of this disclosure capable of producing nepetalactone. Although Lichman et al., Nature Chemical Biology, Vol. 15 Jan. 2019, 71-79 describes NEPS1, an enzyme that can catalyze the oxidation of nepetalactol to nepetalactone, NEPS1 is, in fact, a multifunctional cyclase-dehydrogenase, which is also capable of converting an enol intermediate to nepetalactol through its cyclase activity. Importantly, there is less than 20% sequence identity between the NOR amino acid sequences disclosed herein and the NEPS1 of Lichman et al., demonstrating that the genus of NOR enzymes of this disclosure are novel over those described in the art (See Example 7).

[0090] In some embodiments, the polynucleotide encoding NOR comprises a nucleic acid sequence having at least about 80% identity to a nucleic acid sequence selected from SEQ ID Nos. 1308-1395, 1563-1570 and 1725-1727. In some embodiments, the recombinant microbial cell comprises a polynucleotide comprising a nucleic acid sequence having about 80%, about 81%, about 82%, about 83%, about 84%, about 85%, about 86%, about 87%, about 88%, about 89%, about 90%, about 91%, about 92%, about 93%, about 94%, about 95%, about 96%, about 97%, about 98%, about 99%, or about 100% identity to a nucleic acid selected from SEQ ID Nos. 1308-1395, 1563-1570 and 1725-1727, including any ranges and subranges therebetween. In some embodiments, the polynucleotide consists of a nucleic acid sequence selected from SEQ ID Nos. 1308-1395, 1563-1570 and 1725-1727. In some embodiments, the NOR polynucleotide consists of the nucleic acid sequence of SEQ ID NO. 1393.

[0091] In some embodiments, the NOR comprises an amino acid sequence with at least about 80% identity to an amino acid sequence selected from SEQ ID Nos. 520-607, 775-782 and 1642-1644. For example, in some embodiments, the NOR comprises about 80%, about 81%, about 82%, about 83%, about 84%, about 85%, about 86%, about 87%, about 88%, about 89%, about 90%, about 91%, about 92%, about 93%, about 94%, about 95%, about 96%, about 97%, about 98%, about 99%, or about 100% identity to an amino acid sequence selected from SEQ ID Nos. 520-607, 775-782 or 1642-1644, including any ranges and subranges therebetween. In some embodiments, the NOR consists of an amino acid sequence selected from SEQ ID Nos. 520-607, 775-782 or 1642-1644. In some embodiments, the NOR consists of the amino acid sequence of SEQ ID NO. 605.

[0092] In some embodiments, the NOR is a mutant NOR, which comprises at least one amino acid modification compared to the wild type NOR sequence. In some embodiments, the mutant NOR enzyme is more catalytically active than the corresponding wild type NOR enzyme. In some embodiments, the NOR enzyme has a higher k_{Cat}, as compared to the wild type enzyme. As used herein, k_{Cat} refers to the turnover number or the number of substrate molecules each enzyme site converts to product per unit time. In some embodiments, the mutant NOR enzyme that is more catalytically active than the wild type enzyme, and/or is insensitive to negative regulation, such as, for example, allosteric inhibition.

[0093] In some embodiments, the recombinant microbial cell comprises a polynucleotide encoding a mutant NOR. In some embodiments, the polynucleotide comprises a nucleic acid sequence having at least about 80% identity to a nucleic acid sequence selected from SEQ ID Nos. 1312-1317 and 1319-1321. In some embodiments, the recombinant microbial cell comprises a polynucleotide comprising a nucleic acid sequence having about 80%, about 81%, about 82%, about 83%, about 84%, about 85%, about 86%, about 87%, about 88%, about 89%, about 90%, about 91%, about 92%, about 93%, about 94%, about 95%, about 96%, about 97%, about 98%, about 99%, or about 100% identity to a nucleic acid selected from SEQ ID Nos. 1312-1317 and 1319-1321, including any ranges and subranges therebetween.

[0094] In some embodiments, the mutant NOR comprises an amino acid sequence with at least 80% identity to an amino acid sequence selected from SEQ ID Nos: 524-529, or 531-533. For example, in some embodiments, the mutant NOR comprises about 80%, about 81%, about 82%, about 83%, about 84%, about 85%, about 86%, about 87%, about 88%, about 89%, about 90%, about 91%, about 92%, about 93%, about 94%, about 95%, about 96%, about 97%, about 98%, about 99%, or about 100% identity to an amino acid sequence selected from SEQ ID Nos. 524-529, or 531-533, including any ranges and subranges therebetween. In some embodiments, the NOR consists of an amino acid sequence selected from SEQ ID Nos. 524-529, or 531-533.

[0095] In some embodiments, the heterologous NOR enzyme is selected from the enzymes listed in Table 4.

TABLE 4
Exemplary NOR enzymes

| Protein | | |
|---|---|---|
| SEQ ID | | |
| NO: | Enzyme | Source organism |
| 520 | NOR | Nepeta mussinii |
| 521 | NOR | Nepeta mussinii |
| 522 | NOR | Nepeta cataria |
| 523 | NOR | Nepeta cataria |
| 524 | NOR | Nepeta cataria |
| 525 | NOR | Nepeta cataria |
| 526 | NOR | Nepeta cataria |
| 527 | NOR | Nepeta cataria |
| 528 | NOR | Nepeta cataria |
| 529 | NOR | Nepeta cataria |
| 530 | NOR | Nepeta cataria |
| 531 | NOR | Nepeta cataria |
| 532 | NOR | Nepeta cataria |
| 533 | NOR | Nepeta cataria |
| 534 | NOR | Nepeta cataria |
| 535 | NOR | Nepeta cataria or Nepeta mussinii |
| 536 | NOR | Nepeta cataria or Nepeta mussinii |
| 537 | NOR | Nepeta cataria or Nepeta mussinii |
| 538 | NOR | Nepeta cataria or Nepeta mussinii |
| 539 | NOR | Nepeta cataria or Nepeta mussinii |
| 540 | NOR | Nepeta cataria or Nepeta mussinii |
| 541 | NOR | Nepeta cataria or Nepeta mussinii |
| 542 | NOR | Nepeta cataria or Nepeta mussinii |
| 543 | NOR | Nepeta cataria or Nepeta mussinii |
| 544 | NOR | Nepeta cataria or Nepeta mussinii |
| 545 | NOR | Nepeta cataria or Nepeta mussinii |
| 546 | NOR | Nepeta cataria or Nepeta mussinii |
| 547 | NOR | Nepeta cataria or Nepeta mussinii |
| 548 | NOR | Nepeta cataria or Nepeta mussinii |
| 549 | NOR | Nepeta cataria or Nepeta mussinii |
| 550 | NOR | Nepeta cataria or Nepeta mussinii |
| 551 | NOR | Nepeta cataria or Nepeta mussinii |
| 552 | NOR | Nepeta cataria |
| 553 | NOR | Nepeta cataria |
| 554 | NOR | Nepeta cataria |
| 555 | NOR | Nepeta cataria |
| 556 | NOR | Nepeta cataria |
| 557 | NOR | Nepeta cataria |
| 558 | NOR | Nepeta cataria |
| 559 | NOR | Nepeta cataria |
| 560 | NOR | Nepeta cataria |
| 561 | NOR | Nepeta cataria |
| 562 | NOR | Nepeta cataria |
| 563 | NOR | Nepeta cataria |
| 564 | NOR | Nepeta cataria |
| 565 | NOR | Nepeta cataria |
| 566 | NOR | Nepeta cataria |
| 567 | NOR | Nepeta cataria |
| 568 | NOR | Nepeta cataria |
| 569 | NOR | Nepeta cataria |
| 570 | NOR | Nepeta cataria |
| 571 | NOR | Nepeta cataria |
| 572 | NOR | Nepeta cataria |
| 573 | NOR | Nepeta cataria |
| 574 | NOR | Nepeta cataria |
| 575 | NOR | Nepeta cataria |
| 576 | NOR | Nepeta cataria |
| 577 | NOR | Nepeta cataria |
| 578 | NOR | Nepeta cataria |
| 579 | NOR | Nepeta cataria |
| 580 | NOR | Nepeta cataria |
| 581 | NOR | Nepeta cataria |
| 582 | NOR | Nepeta cataria |
| 583 | NOR | Nepeta cataria |
| 584 | NOR | Nepeta cataria |
| 585 | NOR | Nepeta cataria |
| 586 | NOR | Nepeta cataria |
| 587 | NOR | Nepeta cataria |
| 588 | NOR | Nepeta cataria |
| 589 | NOR | Nepeta cataria |
| 590 | NOR | Nepeta cataria |
| 591 | NOR | Nepeta cataria/mussinii |
| 592 | NOR | Nepeta cataria/mussinii |
| 593 | NOR | Nepeta cataria/mussinii |
| 594 | NOR | Nepeta cataria/mussinii |
| 595 | NOR | Nepeta cataria/mussinii |
| 596 | NOR | Nepeta cataria/mussinii |
| 597 | NOR | Nepeta cataria/mussinii |
| 598 | NOR | Nepeta cataria/mussinii |
| 599 | NOR | Nepeta cataria/mussinii |
| 600 | NOR | Nepeta cataria/mussinii |
| 601 | NOR | Nepeta cataria/mussinii |
| 602 | NOR | Nepeta cataria/mussinii |
| 603 | NOR | Nepeta cataria/mussinii |
| 604 | NOR | Nepeta cataria/mussinii |
| 605 | NOR | Nepeta cataria/mussinii |
| 606 | NOR | Nepeta cataria/mussinii |
| 607 | NOR | Nepeta cataria/mussinii |
| 775 | NOR | Isodon_{—}rubescens |
| 776 | NOR | Prunella_{—}vulgaris |
| 777 | NOR | Agastache_{—}rugosa |
| 778 | NOR | Melissa_{—}officinalis |
| 779 | NOR | Micromeria_{—}fruticosa |
| 780 | NOR | Plectranthus_{—}caninus |
| 781 | NOR | Rosmarinus officinalis |
| 782 | NOR | Nepeta mussinii |
| 1642 | NOR | Nepeta cataria |
| 1643 | NOR | Nepeta cataria |
| 1644 | NOR | Nepeta cataria |

[0096] In some embodiments, the recombinant microbial cells of this disclosure are capable of producing industrially relevant quantities of nepetalactone. As used herein, “industrially relevant quantities” refer to amounts greater than about 0.25 gram per liter of fermentation broth. In some embodiments, the recombinant microbial cells of this disclosure are capable of producing nepetalactone in an amount greater than about 0.25 gram per liter of fermentation broth, for example, greater than about 0.5 gram per liter, greater than about 1 gram per liter, greater than about 5 gram per liter, greater than about 10 gram per liter, greater than about 15 gram per liter, greater than about 20 gram per liter, greater than about 25 gram per liter, greater than about 30 gram per liter, greater than about 35 gram per liter, greater than about 40 gram per liter, greater than about 45 gram per liter, or greater than about 50 gram per liter of fermentation broth, including all subranges and values that lie therebetween.

### Biosynthesis of Dihydronepetalactone Using a Recombinant DND Enzyme

[0097] The disclosure provides recombinant microbial cells capable of producing dihydronepetalactone from nepetalactone. Prior to this disclosure, the production of dihydronepetalactone from nepetalactone had not been demonstrated either in vitro or in vivo, further underscoring the novelty of the recombinant microbial cells of this disclosure capable of producing dihydronepetalactone, over the existing knowledge in the art.

[0098] In some embodiments, the recombinant microbial cells produce dihydronepetalactone from glucose or other comparable carbon sources, such as galactose, glycerol and ethanol. In some embodiments, the recombinant microbial cells produce dihydronepetalactone from glucose without additional precursor supplementation. In some embodiments, the recombinant microbial cells produce dihydronepetalactone from any one of the intermediate substrates of the mevalonate pathway and/or the nepetalactone/dihydronepetalactone synthesis pathway. For example, in some embodiments, the recombinant microbial cells produce dihydronepetalactone when supplemented with any one or more of the substrates listed in Table 1 or Table 2.

[0099] In some embodiments, the recombinant microbial cell of this disclosure comprises one or more polynucleotides encoding a heterologous dihydronepetalactone dehydrogenase (DND).

[0100] In some embodiments, the recombinant microbial cells of this disclosure are capable of producing industrially relevant quantities of dihydronepetalactone. As used herein, “industrially relevant quantities” refer to amounts greater than about 0.25 gram per liter of fermentation broth. In some embodiments, the recombinant microbial cells of this disclosure are capable of producing dihydronepetalactone in an amount greater than about 0.25 gram per liter of fermentation broth, for example, greater than about 0.5 gram per liter, greater than about 1 gram per liter, greater than about 5 gram per liter, greater than about 10 gram per liter, greater than about 15 gram per liter, greater than about 20 gram per liter, greater than about 25 gram per liter, greater than about 30 gram per liter, greater than about 35 gram per liter, greater than about 40 gram per liter, greater than about 45 gram per liter, or greater than about 50 gram per liter of fermentation broth, including all subranges and values that lie therebetween.

### Genetic Engineering of the Mevalonate Pathway

[0101] In some embodiments, the recombinant microbial cells of this disclosure may comprise one or more polynucleotide(s) encoding one or more of the enzymes of mevalonate (MVA) pathway listed in Table 1. For instance, in some embodiments, the recombinant microbial cells of this disclosure may comprise one or more polynucleotide(s) encoding one or more of the following enzymes of the mevalonate pathway: acetyl-CoA C-acetyltransferase (acetoacetyl-CoA thiolase, ERG10), 3-hydroxy-3-methylglutaryl-CoA (HMG-CoA) synthase (ERG13), HMG-CoA reductase (tHMG), Mevalonate kinase (ERG12), Phosphomevalonate kinase (ERG8), Mevalonate pyrophosphate decarboxylase (MVD1, ERG19), and Isopentenyl diphosphate:dimethylallyl diphosphate isomerase (IDI). In some embodiments, the recombinant microbial cell comprises one or more polynucleotide(s) encoding each of the enzymes of mevalonate pathway listed in Table 1.

[0102] Without being bound by theory, it is thought that the overexpression of one or more enzymes of the mevalonate synthesis pathway may increase the flux through the mevalonate pathway to increase the amounts of IPP or DMAPP produced in the recombinant microbial cells of this disclosure, and thereby contribute to the increase in flux through the nepetalactol synthesis pathway, resulting in an increased amount of nepetalactol/nepetalactone/dihydronepetalactone in the recombinant microbial cells of this disclosure.

[0103] In some embodiments, the recombinant microbial cell is engineered to overexpress one or more of the enzymes of the mevalonate pathway listed in Table 1. In some embodiments, the recombinant microbial cell is engineered to overexpress all of the enzymes of the mevalonate pathway listed in Table 1. The amount of the enzyme expressed by the recombinant microbial cell may be higher than the amount of that corresponding enzyme in a wild type microbial cell by about 1.25 fold to about 20 fold, for example, about 1.5 fold, about 2 fold, about 2.5 fold, about 3 fold, about 3.5 fold, about 4 fold, about 4.5 fold, about 5 fold, about 5.5 fold, about 6 fold, about 6.5 fold, about 7 fold, about 8 fold, about 9 fold, about 10 fold, about 15 fold, about 20 fold, about 25 fold, about 30 fold, about 35 fold, about 40 fold, about 45 fold, about 50 fold, about 55 fold, about 60 fold, about 65 fold, about 70 fold, about 75 fold, about 75 fold, about 80 fold, about 85 fold, about 90 fold, about 95 fold, or about 100 fold, including all the subranges and values that lie therebetween.

[0104] In some embodiments the recombinant microbial cell has been modified to contain a heterologous promoter operably linked to one or more endogenous MVA gene (i.e., operably linked to one or more gene from Table 1). In some embodiments, the heterologous promoter is a stronger promoter, as compared to the native promoter. In some embodiments, the recombinant microbial cell is engineered to express an enzyme of the MVA synthesis pathway constitutively. For instance, in some embodiments, the recombinant microbial cell may express an enzyme of the MVA synthesis pathway at a time when the enzyme is not expressed by the wild type microbial cell.

[0105] In other embodiments, the present disclosure envisions overexpressing one or more MVA genes by increasing the copy number of said MVA gene. Thus, in some embodiments, the recombinant microbial cell comprises at least one additional copy of a DNA sequence encoding an enzyme of the mevalonate synthesis pathway, as compared to a wild type microbial cell. In some embodiments, the recombinant microbial cell comprises 1 to 40 additional copies of a DNA sequence encoding an enzyme of the mevalonate synthesis pathway, as compared to a wild type microbial cell. For instance, the recombinant microbial cell may comprise 1, 2, 3, 4, 5, 6, 7, 8, 9, 10, 15, 20, 25, 30, 35, or 40 additional copies of the DNA sequence, compared to a wild type microbial cell, including any ranges and subranges therebetween. For example, in some embodiments, the recombinant microbial cell comprises one or two additional copies of a DNA sequence encoding an enzyme of the mevalonate synthesis pathway listed in Table 1. In some embodiments, the recombinant microbial cell comprises 1-5 additional copies of a DNA sequence encoding HMG.

[0106] In some embodiments, the present disclosure teaches methods of increasing nepetalactol biosynthesis by expressing one or more mutant MVA genes. Thus, in some embodiments, the recombinant microbial cell comprises a DNA sequence encoding for one or more mutant MVA synthesis enzymes. In some embodiments, the one or more mutant MVA synthesis enzymes are more catalytically active than the corresponding wild type enzyme. In some embodiments, the one or more mutant MVA enzymes have a higher k_{Cat}, as compared to the wild type enzyme. In some embodiments, the one or more mutant MVA enzymes that are more catalytically active than the wild type enzyme, are insensitive to negative regulation, such as, for example, allosteric inhibition.

[0107] In some embodiments, the recombinant microbial cell comprises a polynucleotide encoding an enzyme of the mevalonate synthesis pathway, wherein the polynucleotide comprises a nucleic acid sequence having at least about 80% identity to the nucleic acid sequence of the corresponding wild type form of the polynucleotide present in the wild type microbial cell. In some embodiments, the recombinant microbial cell comprises a polynucleotide comprising a nucleic acid sequence having about 80%, about 81%, about 82%, about 83%, about 84%, about 85%, about 86%, about 87%, about 88%, about 89%, about 90%, about 91%, about 92%, about 93%, about 94%, about 95%, about 96%, about 97%, about 98%, about 99%, or about 100% identity to the corresponding wild type form of the polynucleotide present in the wild type microbial cell, including any ranges and subranges therebetween.

[0108] Thus, in some embodiments, the recombinant microbial cell comprises a polynucleotide encoding an enzyme of the mevalonate synthesis pathway, wherein the polynucleotide comprises a nucleic acid sequence having at least about 80%, about 81%, about 82%, about 83%, about 84%, about 85%, about 86%, about 87%, about 88%, about 89%, about 90%, about 91%, about 92%, about 93%, about 94%, about 95%, about 96%, about 97%, about 98%, about 99%, or about 100% identity to a polynucleotide encoding an MVA enzyme selected from those listed in Table 5, including any ranges and subranges therebetween.

[0109] In some embodiments, the recombinant microbial cell expresses an enzyme of the mevalonate synthesis pathway, wherein the enzyme comprises an amino acid sequence comprising at least 80% identity to the sequence of the corresponding enzyme expressed by the wild type microbial cell. In some embodiments, the enzyme expressed by the recombinant microbial cell comprises an amino acid sequence having about 80%, about 81%, about 82%, about 83%, about 84%, about 85%, about 86%, about 87%, about 88%, about 89%, about 90%, about 91%, about 92%, about 93%, about 94%, about 95%, about 96%, about 97%, about 98%, about 99%, or about 100% identity to the corresponding wild type enzyme expressed by the wild type microbial cell, including any ranges and subranges therebetween.

[0110] Thus, in some embodiments, the recombinant microbial cell comprises an enzyme of the mevalonate synthesis pathway, wherein the enzyme comprises an amino acid sequence having at least about 80%, about 81%, about 82%, about 83%, about 84%, about 85%, about 86%, about 87%, about 88%, about 89%, about 90%, about 91%, about 92%, about 93%, about 94%, about 95%, about 96%, about 97%, about 98%, about 99%, or about 100% identity to an MVA enzyme listed in Table 5, including any ranges and subranges therebetween.

[0111] Without being bound by theory, it is thought that HMG is a rate-limiting enzyme in the mevalonate pathway, and therefore, that a truncated version of HMG lacking its regulatory domain may increase the flux through this pathway. Therefore, in some embodiments, the recombinant microbial cell is engineered to express a truncated version of HMG. In some embodiments, the truncated version of HMG lacks the regulatory function of wild type HMG.

[0112] In some embodiments, HMG comprises a membrane-binding region in its N-terminal region and a catalytically active region in its C-terminal region. In some embodiments, the truncated HMG lacks the N-terminal membrane-binding region. As used herein, the membrane binding region enables the binding and/or association of HMG to a membrane, such as, for example, the endoplasmic reticulum membrane. Therefore, in some embodiments, the truncated HMG that lacks its membrane binding region is not associated with and/or bound to a membrane. In some embodiments, the membrane-binding region comprises an amino acid sequence spanning amino acid residue 1 to amino acid residue 552 of SEQ ID NO: 1810. Therefore, in some embodiments, when HMG comprises the amino acid sequence of SEQ ID NO: 1810, the truncated HMG does not comprise the amino acid sequence spanning amino acid residue 1 to amino acid residue 552 of SEQ ID NO: 1810. Further details of truncations of HMG are provided in Polakowski et al., C. Appl Microbiol Biotechnol (1998) 49: 66, which is incorporated herein by reference in its entirety for all purposes.

[0113] Thus, in some embodiments, the HMG enzyme expressed by the recombinant microbial cell may comprise an amino acid sequence that is truncated as compared to the wild type enzyme expressed by the wild type microbial cell. For example, in some embodiments, the recombinant microbial cell is engineered to express 1-5 additional copies of a truncated version of HMG.

[0114] In some embodiments, the recombinant microbial cells of this disclosure are engineered to reduce the expression of one or more of the followings enzymes: Farnesyl pyrophosphate synthetase (ERG20) and Farnesyl-diphosphate farnesyl transferase (squalene synthase; ERG9).

[0115] Without being bound by theory, it is thought that the downregulation of one or both of the ERG20 and ERG9 enzymes may increase flux towards the production of GPP, thereby increasing the flux through the nepetalactol synthesis pathway and increasing the production of nepetalactol/nepetalactone/dihydronepetalactone. In some embodiments, the recombinant microbial cells are engineered to reduce the expression of one or more of the ERG20 and ERG9 enzymes by replacing their native promoters with a heterologous promoter that is weaker than the native promoter. In some embodiments, the recombinant microbial cells are engineered to reduce the expression of one or more of the ERG20 and ERG9 enzymes by introducing one or more mutations into the coding and/or the non-coding regions of the polynucleotide encoding the enzyme. In some embodiments, the recombinant microbial cells are engineered to reduce the expression of one or more of the ERG20 and ERG9 enzymes by deleting at least a portion of their respective coding genes or their promoters.

[0116] In some embodiments, the recombinant microbial cell expresses a recombinant enzyme of the mevalonate synthesis pathway. In some embodiments, the recombinant enzyme is a homolog derived from another microbial species, a plant cell or a mammalian cell. In some embodiments, the homolog is more catalytically active as compared to the wild type enzyme expressed by the wild type microbial cell. In some embodiments, the homolog is selected from the MVA pathway enzyme homologs listed in Table 5.

TABLE 5
An exemplary list of homologs of MVA pathway enzymes identified using BLAST searches

| | % | | | |
|---|---|---|---|---|
| | Pairwise | | | Query |
| | Identity | | | protein |
| | with | | Organism of the | used in |
| Homolog | query | | homolog protein | BLAST |
| Name | protein | Description of the homolog | identified by BLAST | search |
| CDF91480 | 63.70% | ZYBA0S11-03796g1_1 [Zygosaccharomyces bailii CLIB 213] | Zygosaccharomyces bailii | HMG1 |
| CDF91138 | 75.00% | ZYBA0S10-00562g1_1 [Zygosaccharomyces bailii CLIB 213] | Zygosaccharomyces bailii | ERG13 |
| EDZ69577 | 99.50% | YNR043Wp-like protein [Saccharomyces cerevisiae AWRI1631] | Saccharomyces cerevisiae | MVD1 |
| AAT93171 | 99.70% | YNR043W [Saccharomyces cerevisiae] | Saccharomyces cerevisiae | MVD1 |
| EDZ70002 | 99.20% | YMR220Wp-like protein [Saccharomyces cerevisiae AWRI1631] | Saccharomyces cerevisiae | ERG8 |
| EDZ70019 | 99.70% | YMR208Wp-like protein, partial [Saccharomyces cerevisiae AWRI1631] | Saccharomyces cerevisiae | ERG12 |
| EDZ70357 | 99.50% | YLR450Wp-like protein, partial [Saccharomyces cerevisiae AWRI1631] | Saccharomyces cerevisiae | HMG2 |
| AAT92819 | 99.90% | YLR450W [Saccharomyces cerevisiae] | Saccharomyces cerevisiae | HMG2 |
| CDO95793 | 70.90% | unnamed protein product [Kluyveromyces dobzhanskii CBS 2104] | Kluyveromyces dobzhanskii | MVD1 |
| CDO95247 | 68.50% | unnamed protein product [Kluyveromyces dobzhanskii CBS 2104] | Kluyveromyces dobzhanskii | IDI1 |
| CDO93808 | 76.40% | unnamed protein product [Kluyveromyces dobzhanskii CBS 2104] | Kluyveromyces dobzhanskii | ERG10 |
| CDO93737 | 79.90% | unnamed protein product [Kluyveromyces dobzhanskii CBS 2104] | Kluyveromyces dobzhanskii | ERG13 |
| CDO93041 | 51.10% | unnamed protein product [Kluyveromyces dobzhanskii CBS 2104] | Kluyveromyces dobzhanskii | ERG8 |
| XP_002497669 | 73.20% | uncharacterized protein ZYRO0F10846g [Zygosaccharomyces rouxii] | Zygosaccharomyces rouxii | IDI1 |
| XP_002497603 | 57.20% | uncharacterized protein ZYRO0F09328g [Zygosaccharomyces rouxii] | Zygosaccharomyces rouxii | ERG12 |
| XP_002497180 | 70.50% | uncharacterized protein ZYRO0D17270g [Zygosaccharomyces rouxii] | Zygosaccharomyces rouxii | MVD1 |
| XP_002495578 | 61.50% | uncharacterized protein ZYRO0B14696g [Zygosaccharomyces rouxii] | Zygosaccharomyces rouxii | HMG1 |
| XP_002494634 | 51.50% | uncharacterized protein ZYRO0A06072g [Zygosaccharomyces rouxii] | Zygosaccharomyces rouxii | ERG8 |
| XP_002494490 | 80.70% | uncharacterized protein ZYRO0A02728g [Zygosaccharomyces rouxii] | Zygosaccharomyces rouxii | ERG10 |
| XP_002494408 | 75.70% | uncharacterized protein ZYRO0A00770g [Zygosaccharomyces rouxii] | Zygosaccharomyces rouxii | ERG13 |
| XP_022630313 | 70.30% | uncharacterized protein LALA0_S10e02344g [Lachancea lanzarotensis] | Lachancea lanzarotensis | IDI1 |
| XP_022628206 | 75.90% | uncharacterized protein LALA0_S04e04918g [Lachancea lanzarotensis] | Lachancea lanzarotensis | ERG10 |
| XP_022626422 | 50.20% | uncharacterized protein LALA0_S01e04742g [Lachancea lanzarotensis] | Lachancea lanzarotensis | ERG12 |
| XP_022626264 | 77.60% | uncharacterized protein LALA0_S01e01156g [Lachancea lanzarotensis] | Lachancea lanzarotensis | ERG13 |
| XP_022461986 | 72.80% | uncharacterized protein KUCA_T00006002001 [Kuraishia capsulata CBS | Kuraishia capsulata | ERG13 |
| | | 1993] | | |
| XP_455548 | 71.90% | uncharacterized protein KLLA0_F10285g [Kluyveromyces lactis] | Kluyveromyces lactis | MVD1 |
| XP_455121 | 69.10% | uncharacterized protein KLLA0_F00924g [Kluyveromyces lactis] | Kluyveromyces lactis | IDI1 |
| XP_453599 | 77.40% | uncharacterized protein KLLA0_D12056g [Kluyveromyces lactis] | Kluyveromyces lactis | ERG10 |
| XP_453529 | 79.70% | uncharacterized protein KLLA0_D10505g [Kluyveromyces lactis] | Kluyveromyces lactis | ERG13 |
| XP_449306 | 81.20% | uncharacterized protein CAGL0L12364g [[Candida] glabrata] | | ERG10 |
| XP_449268 | 66.10% | uncharacterized protein CAGL0L11506g [[Candida] glabrata] | | HMG1 |
| XP_448008 | 76.10% | uncharacterized protein CAGL0J06952g [[Candida] glabrata] | | IDI1 |
| XP_446972 | 76.60% | uncharacterized protein CAGL0H04081g [[Candida] glabrata] | | ERG13 |
| XP_446138 | 55.10% | uncharacterized protein CAGL0F03861g [[Candida] glabrata] | | ERG12 |
| XP_445335 | 72.10% | uncharacterized protein CAGL0C03630g [[Candida] glabrata] | | MVD1 |
| SMN22164 | 65.40% | similar to Saccharomyces cerevisiae YPL117C IDI1 Isopentenyl | Kazachstania saulgeensis | IDI1 |
| | | diphosphate: dimethylallyl diphosphate isomerase (IPP isomerase) | | |
| | | [Kazachstania saulgeensis] | | |
| SMN22812 | 82.10% | similar to Saccharomyces cerevisiae YPL028W ERG10 Acetyl-CoA C- | Kazachstania saulgeensis | ERG10 |
| | | acetyltransferase (acetoacetyl-CoA thiolase) [Kazachstania saulgeensis] | | |
| SMN21601 | 71.30% | similar to Saccharomyces cerevisiae YNR043W MVD1 Mevalonate | Kazachstania saulgeensis | MVD1 |
| | | pyrophosphate decarboxylase, essential enzyme involved in the biosynthesis | | |
| | | of isoprenoids and sterols, including ergosterol [Kazachstania saulgeensis] | | |
| SMN22092 | 50.10% | similar to Saccharomyces cerevisiae YMR220W ERG8 Phosphomevalonate | Kazachstania saulgeensis | ERG8 |
| | | kinase [Kazachstania saulgeensis] | | |
| SMN22016 | 79.80% | similar to Saccharomyces cerevisiae YML126C ERG13 3-hydroxy-3- | Kazachstania saulgeensis | ERG13 |
| | | methylglutatyl-CoA (HMG-CoA) synthase, catalyzes the formation of HMG- | | |
| | | CoA from acetyl-CoA and acetoacetyl-CoA [Kazachstania saulgeensis] | | |
| CDH15668 | 51.70% | related to Phosphomevalonate kinase [Zygosaccharomyces bailii ISA1307] | Zygosaccharomyces bailii | ERG8 |
| SJM84816 | 51.70% | related to Phosphomevalonate kinase [Zygosaccharomyces ballii] | Zygosaccharomyces bailii | ERG8 |
| SSD62030 | 49.30% | related to Phosphomevalonate kinase [Saccharomycodes ludwigii] | Saccharomycodes ludwigii | ERG8 |
| CDH08870 | 55.30% | related to Mevalonate kinase [Zygosaccharomyces bailii ISA1307] | Zygosaccharomyces bailii | ERG12 |
| SJM85219 | 55.30% | related to Mevalonate kinase [Zygosaccharomyces bailii] | Zygosaccharomyces bailii | ERG12 |
| SJM88302 | 72.90% | probable Isopentenyl-diphosphate Delta-isomerase [Zygosaccharomyces | Zygosaccharomyces bailii | IDI1 |
| | | bailii] | | |
| SSD61603 | 68.00% | probable Isopentenyl-diphosphate Delta-isomerase [Saccharomycodes | Saccharomycodes ludwigii | IDI1 |
| | | ludwigii] | | |
| CDH11232 | 74.80% | probable Hydroxymethylglutaryl-CoA synthase [Zygosaccharomyces bailii | Zygosaccharomyces bailii | ERG13 |
| | | ISA1307] | | |
| SSD60462 | 78.70% | probable Hydroxymethylglutaryl-CoA synthase [Saccharomycodes ludwigii] | Saccharomycodes ludwigii | ERG13 |
| CDH11390 | 63.50% | probable 3-hydroxy-3-methylglutaryl-coenzyme A reductase 1 | Zygosaccharomyces bailii | HMG1 |
| | | [Zygosaccharomyces bailii ISA1307] | | |
| SJM86712 | 63.70% | probable 3-hydroxy-3-methylglutaryl-coenzyme A reductase 1 | Zygosaccharomyces bailii | HMG1 |
| | | [Zygosaccharomyces bailii] | | |
| SCV13952 | 65.00% | probable 3-hydroxy-3-methylglutaryl-coenzyme A reductase 1 [[Candida] glabrata] | | HMG1 |
| GCE98125 | 51.00% | phosphomevalonate kinase [Zygosaccharomyces mellis] | Zygosaccharomyces mellis | ERG8 |
| NP_013947 | 100.00% | phosphomevalonate kinase [Saccharomyces cerevisiae S288C] | Saccharomyces cerevisiae | ERG8 |
| ONH80977 | 99.30% | Phosphomevalonate kinase [Saccharomyces cerevisiae] | Saccharomyces cerevisiae | ERG8 |
| AAA34596 | 98.60% | phosphomevalonate kinase [Saccharomyces cerevisiae] | Saccharomyces cerevisiae | ERG8 |
| AJT30847 | 99.00% | Mvd1p [Saccharomyces cerevisiae YJM1460] | Saccharomyces cerevisiae | MVD1 |
| AJT26802 | 99.00% | Mvd1p [Saccharomyces cerevisiae YJM1402] | Saccharomyces cerevisiae | MVD1 |
| AJT25337 | 98.50% | Mvd1p [Saccharomyces cerevisiae YJM1389] | Saccharomyces cerevisiae | MVD1 |
| AJT22350 | 99.50% | Mvd1p [Saccharomyces cerevisiae YJM1355] | Saccharomyces cerevisiae | MVD1 |
| AJT18309 | 99.50% | Mvd1p [Saccharomyces cerevisiae YJM1252] | Saccharomyces cerevisiae | MVD1 |
| AJT16805 | 99.50% | Mvd1p [Saccharomyces cerevisiae YJM1242] | Saccharomyces cerevisiae | MVD1 |
| AHY77130 | 99.70% | Mvd1p [Saccharomyces cerevisiae YJM993] | Saccharomyces cerevisiae | MVD1 |
| AJT08512 | 99.20% | Mvd1p [Saccharomyces cerevisiae YJM627] | Saccharomyces cerevisiae | MVD1 |
| AJT07024 | 99.00% | Mvd1p [Saccharomyces cerevisiae YJM470] | Saccharomyces cerevisiae | MVD1 |
| AJT04786 | 99.00% | Mvd1p [Saccharomyces cerevisiae YJM326] | Saccharomyces cerevisiae | MVD1 |
| AJT04410 | 99.00% | Mvd1p [Saccharomyces cerevisiae YJM320] | Saccharomyces cerevisiae | MVD1 |
| AJT04035 | 99.00% | Mvd1p [Saccharomyces cerevisiae YJM271] | Saccharomyces cerevisiae | MVD1 |
| AJT02547 | 99.00% | Mvd1p [Saccharomyces cerevisiae YJM195] | Saccharomyces cerevisiae | MVD1 |
| EHN00406 | 96.20% | Mvd1p [Saccharomyces cerevisiae × Saccharomyces kudriavzevii VIN7] | Saccharomyces cerevisiae | MVD1 |
| EEU08298 | 99.50% | Mvd1p [Saccharomyces cerevisiae JAY291] | Saccharomyces cerevisiae | MVD1 |
| EJS41872 | 95.20% | mvd1p [Saccharomyces arboricola H-6] | Saccharomyces arboricola | MVD1 |
| XP_018219912 | 93.20% | MVD1-like protein [Saccharomyces eubayanus] | Saccharomyces eubayanus | MVD1 |
| GCE98861 | 59.40% | mevalonate kinase [Zygosaccharomyces mellis] | Zygosaccharomyces mellis | ERG12 |
| NP_013935 | 100.00% | mevalonate kinase [Saccharomyces cerevisiae S288C] | Saccharomyces cerevisiae | ERG12 |
| EDV11699 | 99.50% | mevalonate kinase [Saccharomyces cerevisiae RM11-1a] | Saccharomyces cerevisiae | ERG12 |
| XP_022676263 | 50.80% | mevalonate kinase [Kluyveromyces marxianus DMKU3-1042] | Kluyveromyces marxianus | ERG12 |
| KTA97153 | 55.10% | Mevalonate kinase [[Candida] glabrata] | | ERG12 |
| BAA24409 | 100.00% | mevalonate kinase, partial [Saccharomyces cerevisiae] | Saccharomyces cerevisiae | ERG12 |
| CUS24402 | 76.60% | LAQU0S16e00892g1_1 [Lachancea quebecensis] | Lachancea quebecensis | ERG10 |
| CUS23819 | 78.40% | LAQU0S12e00738g1_1 [Lachancea quebecensis] | Lachancea quebecensis | ERG13 |
| CUS23399 | 69.20% | LAQU0S09e03884g1_1 [Lachancea quebecensis] | Lachancea quebecensis | MVD1 |
| CUS20468 | 70.30% | LAQU0S01e07272g1_1 [Lachancea quebecensis] | Lachancea quebecensis | IDI1 |
| CUS20353 | 51.20% | LAQU0S01e04720g1_1 [Lachancea quebecensis] | Lachancea quebecensis | ERG12 |
| SCV05860 | 51.50% | LANO_0H16776g1_1 [Lachancea nothofagi CBS 11611] | Lachancea nothofagi | ERG12 |
| SCV05741 | 72.50% | LANO_0H14158g1_1 [Lachancea nothofagi CBS 11611] | Lachancea nothofagi | IDI1 |
| SCO95413 | 78.60% | LANO_0E10286g1_1 [Lachancea nothofagi CBS 11611] | Lachancea nothofagi | ERG10 |
| SCU83042 | 78.50% | LANO_0B08174g1_1 [Lachancea nothofagi CBS 11611] | Lachancea nothofagi | ERG13 |
| SCU77684 | 68.70% | LANO_0A01002g1_1 [Lachancea nothofagi CBS 11611] | Lachancea nothofagi | MVD1 |
| SCV02723 | 77.10% | LAMI_0H02344g1_1 [Lachancea mirantina] | Lachanceamirantina | ERG10 |
| SCU93876 | 73.60% | LAMI_0E15896g1_1 [Lachancea mirantina] | Lachancea mirantina | ERG13 |
| SCU85068 | 71.00% | LAMI_0C10022g1_1 [Lachancea mirantina] | Lachancea mirantina | IDI1 |
| SCU78406 | 53.50% | LAMI_0A04522g1_1 [Lachancea mirantina] | Lachancea mirantina | ERG12 |
| SCC77416 | 68.80% | LAMI_0A01068g1_1 [Lachancea mirantina] | Lachancea mirantina | MVD1 |
| SCV03806 | 69.90% | LAME_0H13366g1_1 [Lachancea meyersii CBS 8951] | Lachancea meyersii | IDI1 |
| SCV03282 | 76.60% | LAME_0H09164g1_1 [Lachancea meyersii CBS 8951] | Lachancea meyersii | ERG10 |
| SCV02561 | 52.30% | LAME_0H02784g1_1 [Lachancea meyersii CBS 8951] | Lachancea meyersii | ERG12 |
| SCV01971 | 77.60% | LAME_0G19746g1_1 [Lachancea meyersii CBS 8951] | Lachancea meyersii | ERG13 |
| SCW04032 | 79.30% | LAFE_0H04412g1_1 [Lachancea fermentati] | Lachancea fermentati | ERG10 |
| SCW03437 | 74.30% | LAFE_0G10396g1_1 [Lachancea fermentati] | Lachancea fermentati | IDI1 |
| SCW01722 | 55.60% | LAFE_0E05820g1_1 [Lachancea fermentati] | Lachancea fermentati | ERG12 |
| SCW00288 | 71.90% | LAFE_0C00848g1_1 [Lachancea fermentati] | Lachancea fermentati | MVD1 |
| SCW00227 | 77.10% | LAFE_0B12244g1_1 [Lachancea fermentati] | Lachancea fermentati | ERG13 |
| SCV99364 | 64.20% | LAFE_0A01552g1_1 [Lachancea fermentati] | Lachancea fermentati | HMG1 |
| SCU90991 | 76.50% | LAFA_0F01244g1_1 [Lachancea sp. CBS 6924] | Lachancea sp. | ERG13 |
| SCU89429 | 71.70% | LAFA_0E17964g1_1 [Lachancea sp. CBS 6924] | Lachancea sp. | IDI1 |
| SCU88301 | 77.90% | LAFA_0E11870g1_1 [Lachancea sp. CBS 6924] | Lachancea sp. | ERG10 |
| SCU79660 | 50.50% | LAFA_0B04720g1_1 [Lachancea sp. CBS 6924] | Lachancea sp. | ERG12 |
| SCU92187 | 68.80% | LADA_0F14950g1_1 [Lachancea dasiensis CBS 10888] | Lachancea dasiensis | MVD1 |
| SCU86145 | 76.10% | LADA_0D12596g1_1 [Lachancea dasiensis CBS 10888] | Lachancea dasiensis | ERG13 |
| SCU85163 | 75.90% | LADA_0D06018g1_1 [Lachancea dasiensis CBS 10888] | Lachancea dasiensis | ERG10 |
| SCU82873 | 72.50% | LADA_0C08416g1_1 [Lachancea dasiensis CBS 10888] | Lachancea dasiensis | IDI1 |
| SCU82514 | 49.70% | LADA_0C05908g1_1 [Lachancea dasiensis CBS 10888] | Lachancea dasiensis | ERG12 |
| XP_002554184 | 77.90% | KLTH0E16192p [Lachancea thermotolerans CBS 6340] | Lachancea thermotolerans | ERG13 |
| XP_002553961 | 75.60% | KLTH0E11154p [Lachancea thermotolerans CBS 6340] | Lachancea thermotolerans | ERG10 |
| XP_002553243 | 50.10% | KLTH0D12232p [Lachancea thermotolerans CBS 6340] | Lachancea thermotolerans | ERG12 |
| XP_002553130 | 70.70% | KLTH0D09658p [Lachancea thermotolerans CBS 6340] | Lachancea thermotolerans | IDI1 |
| XP_002551773 | 69.90% | KLTH0A07238p [Lachancea thermotolerans CBS 6340] | Lachancea thermotolerans | MVD1 |
| GAA25304 | 99.60% | K7_Hmg2p [Saccharomyces cerevisiae Kyokai no. 7] | Saccharomyces cerevisiae | HMG2 |
| GAA25373 | 62.00% | K7_Hmg1p [Saccharomyces cerevisiae Kyokai no. 7] | Saccharomyces cerevisiae | HMG2 |
| GAA25373 | 99.90% | K7_Hmg1p [Saccharomyces cerevisiae Kyokai no. 7] | Saccharomyces cerevisiae | HMG1 |
| GAA25670 | 98.70% | K7_Erg8p [Saccharomyces cerevisiae Kyokai no. 7] | Saccharomyces cerevisiae | ERG8 |
| GCF00844 | 69.20% | isopentenyl-diphosphate delta-isomerase idi1 [Zygosaccharomyces mellis] | Zygosaccharomyces mellis | IDI1 |
| NP_015208 | 100.00% | isopentenyl-diphosphate delta-isomerase IDI1 [Saccharomyces cerevisiae | Saccharomyces cerevisiae | IDI1 |
| | | S288C] | | |
| PTN17316 | 99.70% | isopentenyl-diphosphate delta-isomerase IDI1 [Saccharomyces cerevisiae] | Saccharomyces cerevisiae | IDI1 |
| XP_022676509 | 69.60% | isopentenyl-diphosphate Delta-isomerase [Kluyveromyces marxianus | Kluyveromyces marxianus | IDI1 |
| | | DMKU3-1042] | | |
| OEJ82916 | 69.70% | Isopentenyl-diphosphate Delta-isomerase [Hanseniaspora osmophila] | Hanseniaspora osmophila | IDI1 |
| OEJ89771 | 54.90% | Isopentenyl-diphosphate Delta-isomerase [Hanseniaspora opuntiae] | Hanseniaspora opuntiae | IDI1 |
| KTA98145 | 75.70% | Isopentenyl-diphosphate Delta-isomerase [[Candida] glabrata] | | IDI1 |
| KQC45842 | 100.00% | Isopentenyl diphosphate: dimethylallyl diphosphate isomerase | Saccharomyces sp. | IDI1 |
| | | [Saccharomyces sp. ‘boulardii’] | | |
| AJV93575 | 99.70% | Idi1p [Saccharomyces cerevisiae YJM1527] | Saccharomyces cerevisiae | IDI1 |
| AJW10036 | 99.70% | Idi1p [Saccharomyces cerevisiae YJM1450] | Saccharomyces cerevisiae | IDI1 |
| AJW03938 | 99.70% | Idi1p [Saccharomyces cerevisiae YJM1399] | Saccharomyces cerevisiae | IDI1 |
| AJW14676 | 99.70% | Idi1p [Saccharomyces cerevisiae YJM1250] | Saccharomyces cerevisiae | IDI1 |
| AJV96549 | 99.30% | Idi1p [Saccharomyces cerevisiae YJM195] | Saccharomyces cerevisiae | IDI1 |
| EHM99886 | 92.00% | Idi1p [Saccharomyces cerevisiae × Saccharomyces kudriavzevii VIN7] | Saccharomyces cerevisiae | IDI1 |
| EGA72621 | 100.00% | Idi1p [Saccharomyces cerevisiae AWRI796] | Saccharomyces cerevisiae | IDI1 |
| EJS41430 | 89.90% | idi1p [Saccharomyces arboricola H-6] | Saccharomyces arboricola | IDI1 |
| EJT41267 | 91.70% | IDI1-like protein [Saccharomyces kudriavzevii IFO 1802] | Saccharomyces kudriavzevii | IDI1 |
| XP_018218918 | 94.40% | IDI1-like protein [Saccharomyces eubayanus] | Saccharomyces eubayanus | IDI1 |
| AQZ18416 | 72.90% | IDI1 (YPL117C) [Zygosaccharomyces parabailii] | Zygosaccharomyces parabailii | IDI1 |
| AQZ12067 | 72.50% | IDI1 (YPL117C) [Zygosaccharomyces parabailii] | Zygosaccharomyces parabailii | IDI1 |
| GAV50238 | 72.50% | hypothetical protein ZYGR_0U00940 [Zygosaccharomyces rouxii] | Zygosaccharomyces rouxii | IDI1 |
| GAV49333 | 70.50% | hypothetical protein ZYGR_0N07400 [Zygosaccharomyces rouxii] | Zygosaccharomyces rouxii | MVD1 |
| GAV56087 | 74.60% | hypothetical protein ZYGR_0AZ02590 [Zygosaccharomyces rouxii] | Zygosaccharomyces rouxii | ERG13 |
| GAV55144 | 72.10% | hypothetical protein ZYGR_0AS04680 [Zygosaccharomyces rouxii] | Zygosaccharomyces rouxii | IDI1 |
| GAV55077 | 56.00% | hypothetical protein ZYGR_0AS04000 [Zygosaccharomyces rouxii] | Zygosaccharomyces rouxii | ERG12 |
| GAV54242 | 70.80% | hypothetical protein ZYGR_0AK07440 [Zygosaccharomyces rouxii] | Zygosaccharomyces rouxii | MVD1 |
| GAV52631 | 61.20% | hypothetical protein ZYGR_0AG06220 [Zygosaccharomyces rouxii] | Zygosaccharomyces rouxii | HMG1 |
| GAV51699 | 50.30% | hypothetical protein ZYGR_0AF01700 [Zygosaccharomyces rouxii] | Zygosaccharomyces rouxii | ERG8 |
| GAV51555 | 81.40% | hypothetical protein ZYGR_0AF00260 [Zygosaccharomyces rouxii] | Zygosaccharomyces rouxii | ERG10 |
| GAV46674 | 51.50% | hypothetical protein ZYGR_0A02670 [Zygosaccharomyces rouxii] | Zygosaccharomyces rouxii | ERG8 |
| XP_003688208 | 70.40% | hypothetical protein TPHA_0M01990 [Tetrapisispora phaffii CBS 4417] | Tetrapisispora phaffii | MVD1 |
| XP_003686340 | 55.20% | hypothetical protein TPHA_0G00700 [Tetrapisispora phaffii CBS 4417] | Tetrapisispora phaffii | ERG12 |
| XP_003686328 | 50.90% | hypothetical protein TPHA_0G00580 [Tetrapisispora phaffii CBS 4417] | Tetrapisispora phaffii | ERG8 |
| XR_003684770 | 78.40% | hypothetical protein TPHA_0C01800 [Tetrapisispora phaffii CBS 4417] | Tetrapisispora phaffii | ERG10 |
| XP_003683627 | 76.10% | hypothetical protein TPHA_0A01080 [Tetrapisispora phaffii CBS 4417] | Tetrapisispora phaffii | IDI1 |
| XP_003680869 | 65.80% | hypothetical protein TDEL_0D00740 [Torulaspora delbrueckii] | Torulaspora delbrueckii | HMG1 |
| XP_003679712 | 50.20% | hypothetical protein TDEL_0B03720 [Torulaspora delbrueckii] | Torulaspora delbrueckii | ERG8 |
| XP_003679497 | 85.70% | hypothetical protein TDEL_0B01570 [Torulaspora delbrueckii] | Torulaspora delbrueckii | ERG10 |
| XP_003679373 | 76.70% | hypothetical protein TDEL_0B00330 [Torulaspora delbrueckii] | Torulaspora delbrueckii | ERG13 |
| XP_003679320 | 70.20% | hypothetical protein TDEL_0A07770 [Torulaspora delbrueckii] | Torulaspora delbrueckii | MVD1 |
| XP_003679206 | 54.10% | hypothetical protein TDEL_0A06630 [Torulaspora delbrueckii] | Torulaspora delbrueckii | ERG12 |
| XP_003679098 | 76.60% | hypothetical protein TDEL_0A05550 [Torulaspora delbrueckii] | Torulaspora delbrueckii | IDI1 |
| XP_004178780 | 67.00% | hypothetical protein TBLA_0B04230 [Tetrapisispora blattae CBS 6284] | Tetrapisispora blattae | IDI1 |
| XP_003672455 | 76.50% | hypothetical protein NDAI_0K00230 [Naumovozyma dairenensis CBS 421] | Naumovozyma dairenensis | ERG13 |
| XP_003670380 | 81.40% | hypothetical protein NDAI_0E03200 [Naumovozyma dairenensis CBS 421] | Naumovozyma dairenensis | ERG10 |
| XP_003670305 | 71.10% | hypothetical protein NDAI_0E02450 [Naumovozyma dairenensis CBS 421] | Naumovozyma dairenensis | IDI1 |
| XP_003669874 | 64.90% | hypothetical protein NDAI_0D03170 [Naumovozyma dairenensis CBS 421] | Naumovozyma dairenensis | HMG1 |
| XP_003675606 | 80.90% | hypothetical protein NCAS_0C02500 [Naumovozyma castellii CBS 4309] | Naumovozyma castellii | ERG10 |
| XP_003675530 | 75.40% | hypothetical protein NCAS_0C01740 [Naumovozyma castellii CBS 4309] | Naumovozyma castellii | IDI1 |
| XP_003675374 | 80.10% | hypothetical protein NCAS_0C00150 [Naumovozyma castellii CBS 4309] | Naumovozyma castellii | ERG13 |
| XP_003673559 | 65.90% | hypothetical protein NCAS_0A06180 [Naumovozyma castellii CBS 4309] | Naumovozyma castellii | HMG1 |
| XP_003673492 | 70.10% | hypothetical protein NCAS_0A05510 [Naumovozyma castellii CBS 4309] | Naumovozyma castellii | MVD1 |
| XP_001644409 | 55.90% | hypothetical protein Kpol_1064p33 [Vanderwaltozyma polyspora DSM 70294] | Vanderwaltozyma polyspora | ERG12 |
| XP_001646609 | 70.40% | hypothetical protein Kpol_1028p24 [Vanderwaltozyma polyspora DSM 70294] | Vanderwaltozyma polyspora | MVD1 |
| XP_001642889 | 78.10% | hypothetical protein Kpol_1007p15 [Vanderwaltozyma polyspora DSM 70294] | Vanderwaltozyma polyspora | ERG10 |
| XP_001643950 | 63.20% | hypothetical protein Kpol_1001p4 [Vanderwaltozyma polyspora DSM 70294] | Vanderwaltozyma polyspora | HMG1 |
| XP_001645637 | 70.00% | hypothetical protein Kpol_541p22 [Vanderwaltozyma polyspora DSM 70294] | Vanderwaltozyma polyspora | ERG13 |
| XP_001643379 | 75.40% | hypothetical protein Kpol_479p9 [Vanderwaltozyma polyspora DSM 70294] | Vanderwaltozyma polyspora | IDI1 |
| XP_022466532 | 49.90% | hypothetical protein KNAG_0J02060 [Kazachstania naganishii CBS 8797] | Kazachstania naganishii | ERG8 |
| XP_022466344 | 74.90% | hypothetical protein KNAG_0J00160 [Kazachstania naganishii CBS 8797] | Kazachstania naganishii | ERG13 |
| XP_022465813 | 60.30% | hypothetical protein KNAG_0H01540 [Kazachstania naganishii CBS 8797] | Kazachstania naganishii | IDI1 |
| XP_022464025 | 67.80% | hypothetical protein KNAG_0D00260 [Kazachstania naganishii CBS 8797] | Kazachstania naganishii | MVD1 |
| XP_022462169 | 77.40% | hypothetical protein KNAG_0A02340 [Kazachstania naganishii CBS 8797] | Kazachstania naganishii | ERG10 |
| XP_003959952 | 77.20% | hypothetical protein KAFR_0L02060 [Kazachstania africana CBS 2517] | Kazachstania africana | ERG13 |
| XP_003958824 | 63.80% | hypothetical protein KAFR_0H02800 [Kazachstania africana CBS 2517] | Kazachstania africana | IDI1 |
| XP_003958701 | 82.20% | hypothetical protein KAFR_0H01560 [Kazachstania africana CBS 2517] | Kazachstania africana | ERG10 |
| XP_003956599 | 70.20% | hypothetical protein KAFR_0C04730 [Kazachstania africana CBS 2517] | Kazachstania africana | MVD1 |
| XP_003955761 | 51.00% | hypothetical protein KAFR_0B03290 [Kazachstania africana CBS 2517] | Kazachstania africana | ERG8 |
| XP_003955749 | 50.90% | hypothetical protein KAFR_0B03180 [Kazachstania africana CBS 2517] | Kazachstania africana | ERG12 |
| XP_003648389 | 71.40% | Hypothetical protein Ecym_8293 [Eremothecium cymbaiariae DBVPG#7215] | Eremothecium cymbaiariae | IDI1 |
| XP_003647444 | 49.80% | hypothetical protein Ecym_6245 [Eremothecium cymbaiariae DBVPG#7215] | Eremothecium cymbaiariae | ERG8 |
| XP_003647425 | 53.80% | hypothetical protein Ecym_6226 [Eremothecium cymbaiariae DBVPG#7215] | Eremothecium cymbaiariae | ERG12 |
| XP_003647263 | 74.90% | hypothetical protein Ecym_6042 [Eremothecium cymbaiariae DBVPG#7215] | Eremothecium cymbaiariae | ERG10 |
| XP_003646450 | 75.00% | hypothetical protein Ecym_4602 [Eremothecium cymbaiariae DBVPG#7215] | Eremothecium cymbaiariae | ERG13 |
| ODV84891 | 72.80% | hypothetical protein CANARDRAFT_28632 [[Candida] arabinofermentans NRRL YB-2248] | | ERG13 |
| XP_018983430 | 72.00% | hypothetical protein BABINDRAFT_40366 [Babjeviella inositovora NRRL V- | Babjeviella inositovora | ERG13 |
| | | 12698] | | |
| OXB41221 | 66.20% | hypothetical protein B1J91_L11506g [[Candida] glabrata] | | HMG1 |
| OXB44968 | 72.10% | hypothetical protein B1J91_C03630g [[Candida] glabrata] | | MVD1 |
| NP_013580 | 100.00% | hydroxymethylglutaryl-CoA synthase [Saccharomyces cerevisiae S288C] | Saccharomyces cerevisiae | ERG13 |
| PTN15827 | 99.80% | hydroxymethylglutaryl-CoA synthase [Saccharomyces cerevisiae] | Saccharomyces cerevisiae | ERG13 |
| XP_022677516 | 79.40% | hydroxymethylglutaryl-CoA synthase [Kluyveromyces marxianus DMKU3- | Kluyveromyces marxianus | ERG13 |
| | | 1042] | | |
| BAP73180 | 80.00% | hydroxymethylglutaryl-CoA synthase [Kluyveromyces marxianus] | Kluyveromyces marxianus | ERG13 |
| XP_020069485 | 73.70% | hydroxymethylglutaryl-CoA synthase [Cyberlindnera jadinii NRRL Y-1542] | Cyberlindnera jadinii | ERG13 |
| NP_013555 | 100.00% | hydroxymethylglutaryl-CoA reductase (NADPH) HMG2 [Saccharomyces | Saccharomyces cerevisiae | HMG2 |
| | | cerevisiae S288C] | | |
| PTN30829 | 99.50% | hydroxymethylglutaryl-CoA reductase (NADPH) HMG2 [Saccharomyces | Saccharomyces cerevisiae | HMG2 |
| | | cerevisiae] | | |
| PTN23346 | 99.40% | hydroxymethylglutaryl-CoA reductase (NADPH) HMG2 [Saccharomyces | Saccharomyces cerevisiae | HMG2 |
| | | cerevisiae] | | |
| NP_013636 | 100.00% | hydroxymethylglutaryl-CoA reductase (NADPH) HMG1 [Saccharomyces | Saccharomyces cerevisiae | HMG1 |
| | | cerevisiae S288C] | | |
| PTN24696 | 62.80% | hydroxymethylglutaryl-CoA reductase (NADPH) HMG1 [Saccharomyces | Saccharomyces cerevisiae | HMG2 |
| | | cerevisiae] | | |
| PTN24696 | 99.70% | hydroxymethylglutaryl-CoA reductase (NADPH) HMG1 [Saccharomyces | Saccharomyces cerevisiae | HMG1 |
| | | cerevisiae] | | |
| KOH49325 | 99.60% | HMG2p HMG-CoA reductase [Saccharomyces sp. ‘boulardii’] | Saccharomyces sp. | HMG2 |
| AJV68413 | 99.60% | Hmg2p [Saccharomyces cerevisiae YJM1478] | Saccharomyces cerevisiae | HMG2 |
| AJV67508 | 99.40% | Hmg2p [Saccharomyces cerevisiae YJM1463] | Saccharomyces cerevisiae | HMG2 |
| AJV66156 | 99.50% | Hmg2p [Saccharomyces cerevisiae YJM1447] | Saccharomyces cerevisiae | HMG2 |
| AJV63093 | 99.90% | Hmg2p [Saccharomyces cerevisiae YJM1418] | Saccharomyces cerevisiae | HMG2 |
| AJV60837 | 99.80% | Hmg2p [Saccharomyces cerevisiae YJM1400] | Saccharomyces cerevisiae | HMG2 |
| AJV60387 | 99.20% | Hmg2p [Saccharomyces cerevisiae YJM1399] | Saccharomyces cerevisiae | HMG2 |
| AJV57705 | 99.80% | Hmg2p [Saccharomyces cerevisiae YJM1383] | Saccharomyces cerevisiae | HMG2 |
| AJV56799 | 99.60% | Hmg2p [Saccharomyces cerevisiae YJM1356] | Saccharomyces cerevisiae | HMG2 |
| AJV56344 | 99.70% | Hmg2p [Saccharomyces cerevisiae YJM1355] | Saccharomyces cerevisiae | HMG2 |
| AJV55892 | 99.90% | Hmg2p [Saccharomyces cerevisiae YJM1342] | Saccharomyces cerevisiae | HMG2 |
| AJV55003 | 99.90% | Hmg2p [Saccharomyces cerevisiae YJM1338] | Saccharomyces cerevisiae | HMG2 |
| AJV54558 | 99.60% | Hmg2p [Saccharomyces cerevisiae YJM1336] | Saccharomyces cerevisiae | HMG2 |
| AJV52757 | 99.50% | Hmg2p [Saccharomyces cerevisiae YJM1307] | Saccharomyces cerevisiae | HMG2 |
| AJV52306 | 99.70% | Hmg2p [Saccharomyces cerevisiae YJM1304] | Saccharomyces cerevisiae | HMG2 |
| AJV5J863 | 99.70% | Hmg2p [Saccharomyces cerevisiae YJM1273] | Saccharomyces cerevisiae | HMG2 |
| AJV50514 | 99.70% | Hmg2p [Saccharomyces cerevisiae YJM1248] | Saccharomyces cerevisiae | HMG2 |
| AJV49196 | 99.60% | Hmg2p [Saccharomyces cerevisiae YJM1208] | Saccharomyces cerevisiae | HMG2 |
| AJV47381 | 99.70% | Hmg2p [Saccharomyces cerevisiae YJM1133] | Saccharomyces cerevisiae | HMG2 |
| AJV46930 | 99.70% | Hmg2p [Saccharomyces cerevisiae YJM1129] | Saccharomyces cerevisiae | HMG2 |
| AJV46478 | 99.60% | Hmg2p [Saccharomyces cerevisiae YJM1083] | Saccharomyces cerevisiae | HMG2 |
| AHY78797 | 99.60% | Hmg2p [Saccharomyces cerevisiae YJM993] | Saccharomyces cerevisiae | HMG2 |
| AJV78151 | 99.70% | Hmg2p [Saccharomyces cerevisiae YJM456] | Saccharomyces cerevisiae | HMG2 |
| AJV75447 | 99.50% | Hmg2p [Saccharomyces cerevisiae YJM320] | Saccharomyces cerevisiae | HMG2 |
| AJV74606 | 99.50% | Hmg2p [Saccharomyces cerevisiae YJM270] | Saccharomyces cerevisiae | HMG2 |
| AJV73338 | 99.70% | Hmg2p [Saccharomyces cerevisiae YJM195] | Saccharomyces cerevisiae | HMG2 |
| EHN05753 | 99.60% | Hmg2p [Saccharomyces cerevisiae × Saccharomyces kudriavzevii VIN7] | Saccharomyces cerevisiae | HMG2 |
| EHN01037 | 92.50% | Hmg2p [Saccharomyces cerevisiae × Saccharomyces kudriavzevii VIN7] | Saccharomyces cerevisiae | HMG2 |
| EGA77584 | 99.70% | Hmg2p [Saccharomyces cerevisiae Vin13] | Saccharomyces cerevisiae | HMG2 |
| EWG89789 | 99.60% | Hmg2p [Saccharomyces cerevisiae P301] | Saccharomyces cerevisiae | HMG2 |
| EGA81622 | 99.60% | Hmg2p [Saccharomyces cerevisiae Lalvin QA23] | Saccharomyces cerevisiae | HMG2 |
| EJT44740 | 91.80% | HMG2-like protein [Saccharomyces kudriavzevii IFO 1802] | Saccharomyces kudriavzevii | HMG2 |
| XP_018220830 | 91.00% | HMG2-like protein [Saccharomyces eubayanus] | Saccharomyces eubayanus | HMG2 |
| AQZ18362 | 63.60% | HMG2 (YLR450W) and HMG1 (YML075C) [Zygosaccharomyces parabailii] | Zygosaccharomyces parabailii | HMG1 |
| AQZ15653 | 63.60% | HMG2 (YLR450W) and HMG1 (YML075C) [Zygosaccharomyces parabailii] | Zygosaccharomyces parabailii | HMG1 |
| AJT00194 | 61.90% | Hmg1p [Saccharomyces cerevisiae YJM1574] | Saccharomyces cerevisiae | HMG2 |
| AJT00194 | 99.80% | Hmg1p [Saccharomyces cerevisiae YJM1574] | Saccharomyces cerevisiae | HMG1 |
| AJS96703 | 99.50% | Hmg1p [Saccharomyces cerevisiae YJM1463] | Saccharomyces cerevisiae | HMG1 |
| AJS96264 | 99.90% | Hmg1p [Saccharomyces cerevisiae YJM1460] | Saccharomyces cerevisiae | HMG1 |
| AJS90608 | 99.90% | Hmg1p [Saccharomyces cerevisiae YJM1401] | Saccharomyces cerevisiae | HMG1 |
| AJS90173 | 99.60% | Hmg1p [Saccharomyces cerevisiae YJM1400] | Saccharomyces cerevisiae | HMG1 |
| AJS88421 | 61.90% | Hmg1p [Saccharomyces cerevisiae YJM1387] | Saccharomyces cerevisiae | HMG2 |
| AJS88421 | 99.70% | Hmg1p [Saccharomyces cerevisiae YJM1387] | Saccharomyces cerevisiae | HMG1 |
| AJS85371 | 62.50% | Hmg1p [Saccharomyces cerevisiae YJM1342] | Saccharomyces cerevisiae | HMG2 |
| AJS85371 | 99.60% | Hmg1p [Saccharomyces cerevisiae YJM1342] | Saccharomyces cerevisiae | HMG1 |
| AJS81024 | 99.80% | Hmg1p [Saccharomyces cerevisiae YJM1252] | Saccharomyces cerevisiae | HMG1 |
| AJS80590 | 99.80% | Hmg1p [Saccharomyces cerevisiae YJM1250] | Saccharomyces cerevisiae | HMG1 |
| AJS79281 | 61.90% | Hmg1p [Saccharomyces cerevisiae YJM1242] | Saccharomyces cerevisiae | HMG2 |
| AJS79281 | 99.80% | Hmg1p [Saccharomyces cerevisiae YJM1242] | Saccharomyces cerevisiae | HMG1 |
| AJS76667 | 99.80% | Hmg1p [Saccharomyces cerevisiae YJM1129] | Saccharomyces cerevisiae | HMG1 |
| AHY76391 | 99.90% | Hmg1p [Saccharomyces cerevisiae YJM993] | Saccharomyces cerevisiae | HMG1 |
| AHY76391 | 61.90% | Hmg1p [Saccharomyces cerevisiae YJM993] | Saccharomyces cerevisiae | HMG2 |
| AJS72296 | 99.80% | Hmg1p [Saccharomyces cerevisiae YJM969] | Saccharomyces cerevisiae | HMG1 |
| AJS71856 | 99.90% | Hmg1p [Saccharomyces cerevisiae YJM693] | Saccharomyces cerevisiae | HMG1 |
| AJS70550 | 99.70% | Hmg1p [Saccharomyces cerevisiae YJM682] | Saccharomyces cerevisiae | HMG1 |
| AJS69670 | 99.60% | Hmg1p [Saccharomyces cerevisiae YJM627] | Saccharomyces cerevisiae | HMG1 |
| AJS64422 | 99.80% | Hmg1p [Saccharomyces cerevisiae YJM271] | Saccharomyces cerevisiae | HMG1 |
| AJS63986 | 62.30% | Hmg1p [Saccharomyces cerevisiae YJM270] | Saccharomyces cerevisiae | HMG2 |
| AJS63986 | 99.70% | Hmg1p [Saccharomyces cerevisiae YJM270] | Saccharomyces cerevisiae | HMG1 |
| AJS62677 | 99.80% | Hmg1p [Saccharomyces cerevisiae YJM195] | Saccharomyces cerevisiae | HMG1 |
| AJS62242 | 99.80% | Hmg1p [Saccharomyces cerevisiae YJM193] | Saccharomyces cerevisiae | HMG1 |
| EGA77439 | 100.00% | Hmg1p [Saccharomyces cerevisiae Vin13] | Saccharomyces cerevisiae | HMG1 |
| EWG94281 | 99.80% | Hmg1p [Saccharomyces cerevisiae R103] | Saccharomyces cerevisiae | HMG1 |
| EWG83860 | 99.80% | Hmg1p [Saccharomyces cerevisiae R008] | Saccharomyces cerevisiae | HMG1 |
| EEU05004 | 99.70% | Hmg1p [Saccharomyces cerevisiae JAY291] | Saccharomyces cerevisiae | HMG1 |
| EGA57422 | 99.50% | Hmg1p [Saccharomyces cerevisiae FostersB] | Saccharomyces cerevisiae | HMG1 |
| CAY81746 | 62.60% | Hmg1p [Saccharomyces cerevisiae EC1118] | Saccharomyces cerevisiae | HMG2 |
| CAY81746 | 99.60% | Hmg1p [Saccharomyces cerevisiae EC1118] | Saccharomyces cerevisiae | HMG1 |
| EJS42513 | 91.90% | hmg1p [Saccharomyces arboricola H-6] | Saccharomyces arboricola | HMG1 |
| XP_018219995 | 91.00% | HMG1-like protein [Saccharomyces eubayanus] | Saccharomyces eubayanus | HMG1 |
| KZV08767 | 61.90% | HMG1 [Saccharomyces cerevisiae] | Saccharomyces cerevisiae | HMG2 |
| KZV08767 | 99.70% | HMG1 [Saccharomyces cerevisiae] | Saccharomyces cerevisiae | HMG1 |
| XP_017988495 | 74.10% | HER221Cp [Eremothecium sinecaudum] | Eremothecium sinecaudum | ERG13 |
| XP_017986617 | 72.20% | HCL530Cp [Eremothecium sinecaudum] | Eremothecium sinecaudum | IDI1 |
| AEY98585 | 68.50% | FAGL232Cp [Eremothecium gossypii FDAG1] | Eremothecium gossypii | MVD1 |
| AJS92313 | 99.80% | Erg13p [Saccharomyces cerevisiae YJM1418] | Saccharomyces cerevisiae | ERG13 |
| AJS89693 | 99.80% | Erg13p [Saccharomyces cerevisiae YJM1399] | Saccharomyces cerevisiae | ERG13 |
| AJS82290 | 99.60% | Erg13p [Saccharomyces cerevisiae YJM1307] | Saccharomyces cerevisiae | ERG13 |
| AJS67872 | 99.80% | Erg13p [Saccharomyces cerevisiae YJM470] | Saccharomyces cerevisiae | ERG13 |
| AJS66556 | 99.60% | Erg13p [Saccharomyces cerevisiae YJM451] | Saccharomyces cerevisiae | ERG13 |
| AJS65680 | 99.80% | Erg13p [Saccharomyces cerevisiae YJM428] | Saccharomyces cerevisiae | ERG13 |
| AJS63065 | 99.80% | Erg13p [Saccharomyces cerevisiae YJM244] | Saccharomyces cerevisiae | ERG13 |
| EWG94231 | 99.80% | Erg13p [Saccharomyces cerevisiae R103] | Saccharomyces cerevisiae | ERG13 |
| EWG89196 | 99.80% | Erg13p [Saccharomyces cerevisiae P301] | Saccharomyces cerevisiae | ERG13 |
| EGA57459 | 99.80% | Erg13p [Saccharomyces cerevisiae FostersB] | Saccharomyces cerevisiae | ERG13 |
| EGA81523 | 100.00% | Erg13p, partial [Saccharomyces cerevisiae Lalvin QA23] | Saccharomyces cerevisiae | ERG13 |
| EJT44320 | 97.40% | ERG13-like protein [Saccharomyces kudriavzevii IFO 1802] | Saccharomyces kudriavzevii | ERG13 |
| XP_018219948 | 95.90% | ERG13-like protein [Saccharomyces eubayanus] | Saccharomyces eubayanus | ERG13 |
| AQZ15814 | 75.10% | ERG13 (YML126C) [Zygosaccharomyces parabailii] | Zygosaccharomyces parabailii | ERG13 |
| AJS98710 | 99.50% | Erg12p [Saccharomyces cerevisiae YJM1526] | Saccharomyces cerevisiae | ERG12 |
| AJS96096 | 99.50% | Erg12p [Saccharomyces cerevisiae YJM1450] | Saccharomyces cerevisiae | ERG12 |
| AJS95662 | 99.50% | Erg12p [Saccharomyces cerevisiae YJM1447] | Saccharomyces cerevisiae | ERG12 |
| AJS90876 | 99.50% | Erg12p [Saccharomyces cerevisiae YJM1401] | Saccharomyces cerevisiae | ERG12 |
| AJS90009 | 99.50% | Erg12p [Saccharomyces cerevisiae YJM1399] | Saccharomyces cerevisiae | ERG12 |
| AJS81726 | 99.50% | Erg12p [Saccharomyces cerevisiae YJM1273] | Saccharomyces cerevisiae | ERG12 |
| AJS80425 | 99.50% | Erg12p [Saccharomyces cerevisiae YJM1248] | Saccharomyces cerevisiae | ERG12 |
| AJS77376 | 99.50% | Erg12p [Saccharomyces cerevisiae YJM1133] | Saccharomyces cerevisiae | ERG12 |
| AJP40902 | 99.50% | Erg12p [Saccharomyces cerevisiae YJM1078] | Saccharomyces cerevisiae | ERG12 |
| AHY76662 | 99.80% | Erg12p [Saccharomyces cerevisiae YJM993] | Saccharomyces cerevisiae | ERG12 |
| AJS68191 | 99.80% | Erg12p [Saccharomyces cerevisiae YJM470] | Saccharomyces cerevisiae | ERG12 |
| AJS65126 | 99.30% | Erg12p [Saccharomyces cerevisiae YJM320] | Saccharomyces cerevisiae | ERG12 |
| AJS64256 | 99.50% | Erg12p [Saccharomyces cerevisiae YJM270] | Saccharomyces cerevisiae | ERG12 |
| AJS63818 | 99.30% | Erg12p [Saccharomyces cerevisiae YJM248] | Saccharomyces cerevisiae | ERG12 |
| AJS62946 | 99.50% | Erg12p [Saccharomyces cerevisiae YJM195] | Saccharomyces cerevisiae | ERG12 |
| EHN05445 | 99.60% | Erg12p [Saccharomyces cerevisiae × Saccharomyces kudriavzevii VIN7] | Saccharomyces cerevisiae | ERG12 |
| EHN00772 | 89.40% | Erg12p [Saccharomyces cerevisiae × Saccharomyces kudriavzevii VIN7] | Saccharomyces cerevisiae | ERG12 |
| EGA77322 | 99.30% | Erg12p [Saccharomyces cerevisiae Vin13] | Saccharomyces cerevisiae | ERG12 |
| EGA73546 | 99.30% | Erg12p [Saccharomyces cerevisiae AWRI796] | Saccharomyces cerevisiae | ERG12 |
| EJS44170 | 88.70% | erg12p [Saccharomyces arboricola H-6] | Saccharomyces arboricola | ERG12 |
| EJT42123 | 89.80% | ERG12-like protein [Saccharomyces kudriavzevii IFO 1802] | Saccharomyces kudriavzevii | ERG12 |
| XP_018220256 | 87.40% | ERG12-like protein [Saccharomyces eubayanus] | Saccharomyces eubayanus | ERG12 |
| AQZ14941 | 55.10% | ERG12 (YMR208W) [Zygosaccharomyces parabailii] | Zygosaccharomyces parabailii | ERG12 |
| AQZ10756 | 55.30% | ERG12 (YMR208W) [Zygosaccharomyces parabailii] | Zygosaccharomyces parabailii | ERG12 |
| AJV94633 | 99.70% | Erg10p [Saccharomyces cerevisiae YJM1574] | Saccharomyces cerevisiae | ERG10 |
| AJV91203 | 99.70% | Erg10p [Saccharomyces cerevisiae YJM1460] | Saccharomyces cerevisiae | ERG10 |
| AJW10118 | 99.70% | Erg10p [Saccharomyces cerevisiae YJM1450] | Saccharomyces cerevisiae | ERG10 |
| AJW07512 | 99.50% | Erg10p [Saccharomyces cerevisiae YJM1433] | Saccharomyces cerevisiae | ERG10 |
| AJW04020 | 99.70% | Erg10p [Saccharomyces cerevisiae YJM1399] | Saccharomyces cerevisiae | ERG10 |
| AJW19535 | 99.70% | Erg10p [Saccharomyces cerevisiae YJM1342] | Saccharomyces cerevisiae | ERG10 |
| AJW25866 | 99.70% | Erg10p [Saccharomyces cerevisiae YJM969] | Saccharomyces cerevisiae | ERG10 |
| AJW25209 | 99.70% | Erg10p [Saccharomyces cerevisiae YJM689] | Saccharomyces cerevisiae | ERG10 |
| AJV98817 | 99.70% | Erg10p [Saccharomyces cerevisiae YJM320] | Saccharomyces cerevisiae | ERG10 |
| EHN04392 | 99.80% | Erg10p [Saccharomyces cerevisiae × Saccharomyces kudriavzevii VIN7] | Saccharomyces cerevisiae | ERG10 |
| EGA76382 | 100.00% | Erg10p [Saccharomyces cerevisiae Vin13] | Saccharomyces cerevisiae | ERG10 |
| EJS41294 | 96.00% | erg10p [Saccharomyces arboricola H-6] | Saccharomyces arboricola | ERG10 |
| XP_018218998 | 95.50% | ERG10-like protein [Saccharomyces eubayanus] | Saccharomyces eubayanus | ERG10 |
| AQZ14383 | 82.20% | ERG10 (YPL028W) [Zygosaccharomyces parabailii] | Zygosaccharomyces parabailii | ERG10 |
| AQZ10340 | 82.70% | ERG10 (YPL028W) [Zygosaccharomyces parabailii] | Zygosaccharomyces parabailii | ERG10 |
| GCE99731 | 81.20% | erg10, acetyl-CoA C-acetyltransferase [Zygosaccharomyces mellis] | Zygosaccharomyces mellis | ERG10 |
| AJT01353 | 98.20% | Erg8p [Saccharomyces cerevisiae YJM1615] | Saccharomyces cerevisiae | ERG8 |
| AJS97853 | 99.30% | Erg8p [Saccharomyces cerevisiae YJM1478] | Saccharomyces cerevisiae | ERG8 |
| AJS96980 | 98.20% | Erg8p [Saccharomyces cerevisiae YJM1463] | Saccharomyces cerevisiae | ERG8 |
| AJS95674 | 98.20% | Erg8p [Saccharomyces cerevisiae YJM1447] | Saccharomyces cerevisiae | ERG8 |
| AJS92643 | 98.90% | Erg8p [Saccharomyces cerevisiae YJM1418] | Saccharomyces cerevisiae | ERG8 |
| AJS91766 | 99.30% | Erg8p [Saccharomyces cerevisiae YJM1415] | Saccharomyces cerevisiae | ERG8 |
| AJS90021 | 98.40% | Erg8p [Saccharomyces cerevisiae YJM1399] | Saccharomyces cerevisiae | ERG8 |
| AJS89145 | 98.20% | Erg8p [Saccharomyces cerevisiae YJM1388] | Saccharomyces cerevisiae | ERG8 |
| AJS87837 | 99.10% | Erg8p [Saccharomyces cerevisiae YJM1385] | Saccharomyces cerevisiae | ERG8 |
| AJS85654 | 98.40% | Erg8p [Saccharomyces cerevisiae YJM1342] | Saccharomyces cerevisiae | ERG8 |
| AJS84771 | 98.20% | Erg8p [Saccharomyces cerevisiae YJM1338] | Saccharomyces cerevisiae | ERG8 |
| AJS81738 | 98.20% | Erg8p [Saccharomyces cerevisiae YJM1273] | Saccharomyces cerevisiae | ERG8 |
| AJS80865 | 98.40% | Erg8p [Saccharomyces cerevisiae YJM1250] | Saccharomyces cerevisiae | ERG8 |
| AJS80437 | 98.40% | Erg8p [Saccharomyces cerevisiae YJM1248] | Saccharomyces cerevisiae | ERG8 |
| AJS78262 | 98.20% | Erg8p [Saccharomyces cerevisiae YJM1199] | Saccharomyces cerevisiae | ERG8 |
| AJS77388 | 98.40% | Erg8p [Saccharomyces cerevisiae YJM1133] | Saccharomyces cerevisiae | ERG8 |
| AHY76674 | 99.60% | Erg8p [Saccharomyces cerevisiae YJM993] | Saccharomyces cerevisiae | ERG8 |
| AJS72138 | 98.90% | Erg8p [Saccharomyces cerevisiae YJM693] | Saccharomyces cerevisiae | ERG8 |
| AJS70390 | 98.20% | Erg8p [Saccharomyces cerevisiae YJM681] | Saccharomyces cerevisiae | ERG8 |
| AJS68638 | 98.40% | Erg8p [Saccharomyces cerevisiae YJM541] | Saccharomyces cerevisiae | ERG8 |
| AJS68203 | 99.30% | Erg8p [Saccharomyces cerevisiae YJM470] | Saccharomyces cerevisiae | ERG8 |
| AJS66886 | 99.30% | Erg8p [Saccharomyces cerevisiae YJM451] | Saccharomyces cerevisiae | ERG8 |
| AJS65138 | 98.40% | Erg8p [Saccharomyces cerevisiae YJM320] | Saccharomyces cerevisiae | ERG8 |
| AJS62958 | 98.20% | Erg8p [Saccharomyces cerevisiae YJM195] | Saccharomyces cerevisiae | ERG8 |
| EHN00784 | 82.70% | Erg8p [Saccharomyces cerevisiae × Saccharomyces kudriavzevii VIN7] | Saccharomyces cerevisiae | ERG8 |
| EWG84132 | 99.30% | Erg8p [Saccharomyces cerevisiae R008] | Saccharomyces cerevisiae | ERG8 |
| EEU06624 | 98.20% | Erg8p [Saccharomyces cerevisiae JAY291] | Saccharomyces cerevisiae | ERG8 |
| EGA57236 | 99.30% | Erg8p [Saccharomyces cerevisiae FostersB] | Saccharomyces cerevisiae | ERG8 |
| EJS44177 | 80.50% | erg8p [Saccharomyces arboricola H-6] | Saccharomyces arboricola | ERG8 |
| AQZ17926 | 51.20% | ERG8 (YMR220W) [Zygosaccharomyces parabailii] | Zygosaccharomyces parabailii | ERG8 |
| AQZ11848 | 51.70% | ERG8 (YMR220W) [Zygosaccharomyces parabailii] | Zygosaccharomyces parabailii | ERG8 |
| NP_014441 | 100.00% | diphosphomevalonate decarboxylase MVD1 [Saccharomyces cerevisiae | Saccharomyces cerevisiae | MVD1 |
| | | S288C] | | |
| GCE98064 | 69.80% | diphosphomevalonate decarboxylase [Zygosaccharomyces mellis] | Zygosaccharomyces mellis | MVD1 |
| XP_011275729 | 69.80% | Diphosphomevalonate decarboxylase [Wickerhamomyces ciferrii] | Wickerhamomyces ciferrii | MVD1 |
| XP_022674578 | 72.20% | diphosphomevalonate decarboxylase [Kluyveromyces marxianus DMKU3- | Kluyveromyces marxianus | MVD1 |
| | | 1042] | | |
| ONH68647 | 68.20% | Diphosphomevalonate decarboxylase [Cyberlindnera fabianii] | Cyberlindnera fabianii | MVD1 |
| KTB12572 | 72.10% | Diphosphomevalonate decarboxylase [[Candida] glabrata] | | MVD1 |
| KTA97751 | 72.10% | Diphosphomevalonate decarboxylase [[Candida] glabrata] | | MVD1 |
| CDR37714 | 68.40% | CYFA0S01e15566g1_1 [Cyberlindnera fabianii] | Cyberlindnera fabianii | MVD1 |
| IFI4_A | 97.80% | Chain A, MEVALONATE 5-DIPHOSPHATE DECARBOXYLASE | Saccharomyces cerevisiae | MVD1 |
| | | [Saccharomyces cerevisiae] | | |
| 5XZ5_A | 100.00% | Chain A, Acetyl-CoA acetyltransferase [Saccharomyces cerevisiae S288C] | Saccharomyces cerevisiae | ERG10 |
| 5XYJ_A | 99.70% | Chain A, Acetyl-CoA acetyltransferase [Saccharomyces cerevisiae S288C] | Saccharomyces cerevisiae | ERG10 |
| NP_986435 | 68.50% | AGL232Cp [Eremothecium gossypii ATCC 10895] | Eremothecium gossypii | MVD1 |
| NP_984262 | 76.60% | ADR165Cp [Eremothecium gossypii ATCC 10895] | Eremothecium gossypii | ERG10 |
| NP_983739 | 75.60% | ADL356Cp [Eremothecium gossypii ATCC 10895] | Eremothecium gossypii | ERG13 |
| NP_983828 | 71.40% | ADL268Cp [Eremothecium gossypii ATCC 10895] | Eremothecium gossypii | IDI1 |
| NP_015297 | 100.00% | acetyl-CoA C-acetyltransferase [Saccharomyces cerevisiae S288C] | Saccharomyces cerevisiae | ERG10 |
| GAX68822 | 99.50% | acetyl-CoA C-acetyltransferase [Saccharomyces cerevisiae] | Saccharomyces cerevisiae | ERG10 |
| CDH13613 | 82.20% | Acetyl-CoA acetyltransferase [Zygosaccharomyces bailii ISA1307] | Zygosaccharomyces bailii | ERG10 |
| XP_022677456 | 76.70% | acetyl-CoA acetyltransferase [Kluyveromyces marxianus DMKU3-1042] | Kluyveromyces marxianus | ERG10 |
| BAP73114 | 76.90% | acetyl-CoA acetyltransferase [Kluyveromyces marxianus] | Kluyveromyces marxianus | ERG10 |
| KTA99270 | 81.40% | Acetyl-CoA acetyltransferase [[Candida] glabrata] | | ERG10 |
| CCA60775 | 96.00% | acetoacetyl CoA thiolase [Saccharomyces uvarum] | Saccharomyces uvarum | ERG10 |
| AGO14103 | 77.40% | AaceriADR165Cp [Saccharomycetaceae sp. ‘Ashbya aceri’] | Saccharomycetaceae sp. | ERG10 |
| AGO12980 | 71.00% | AaceriADL268Cp [Saccharomycetaceae sp. ‘Ashbya aceri’] | Saccharomycetaceae sp. | IDI1 |
| GCE98385 | 73.80% | 3-hydroxy-3-methylglutaryl coenzyme A synthase [Zygosaccharomyces | Zygosaccharomyces mellis | ERG13 |
| | | mellis] | | |
| ONH78258 | 99.90% | 3-hydroxy-3-methylglutaryl-coenzyme A reductase [Saccharomyces | Saccharomyces cerevisiae | HMG1 |
| | | cerevisiae] | | |
| ONH76081 | 99.50% | 3-hydroxy-3-methylglutaryl-coenzyme A reductase [Saccharomyces | Saccharomyces cerevisiae | HMG2 |
| | | cerevisiae] | | |

| | | | |
|---|---|---|---|
| KTB22480 | 66.20% | 3-hydroxy-3-methylglutaryl-coenzyme A reductase 1 [[Candida] glabrata] | HMG1 |
| KTA97912 | 66.10% | 3-hydroxy-3-methylglutaryl-coenzyme A reductase 1 [[Candida] glabrata] | HMG1 |

### Genetic Engineering of the Acetyl-CoA (PDH Bypass) Pathway

[0117] In some embodiments, the recombinant microbial cell is engineered to possess one or more enzyme activities that results in an increased flux through the PDH bypass pathway, to thereby increase the amount of cytosolic acetyl-CoA. In some embodiments, the one or more enzymatic activities is selected from pyruvate decarboxylase activity, acetyl-CoA synthetase activity, acetyl-CoA synthetase isoform 2 activity, and acetaldehyde dehydrogenase activity. In some embodiments, the recombinant microbial cell comprises one or more polynucleotide(s) encoding one or more of the following enzymes of the acetyl-CoA (PDH bypass) pathway: pyruvate decarboxylase (PDC), acetyl-CoA synthetase isoform 1 (ACS1), acetyl-CoA synthetase isoform 2 (ACS2), and acetaldehyde dehydrogenase (ALD6). In some embodiments, the one or more polynucleotide(s) encoding one or more enzymes of the acetyl-CoA (PDH bypass) pathway is derived from Saccharomyces cerevisiae.

[0118] Without being bound by theory, it is thought that the overexpression of one or more enzymes of the acetyl-CoA (PDH bypass) pathway may increase the flux through PDH bypass pathway to increase the amount of cytosolic acetyl-CoA in the recombinant microbial cells of this disclosure, which may in turn increase the flux through the mevalonate and nepetalactol synthesis pathways, ultimately resulting in an increased production of nepetalactol/nepetalactone/dihydronepetalactone.

[0119] In some embodiments, the recombinant microbial cell is engineered to overexpress one or more of the enzymes of the PDH bypass pathway. In some embodiments, the recombinant microbial cell is engineered to overexpress all of the enzymes of the PDH bypass pathway. The amount of the enzyme expressed by the recombinant microbial cell may be higher than the amount of that corresponding enzyme in a wild type microbial cell by about 1.25 fold to about 20 fold, for example, about 1.5 fold, about 2 fold, about 2.5 fold, about 3 fold, about 3.5 fold, about 4 fold, about 4.5 fold, about 5 fold, about 5.5 fold, about 6 fold, about 6.5 fold, about 7 fold, about 8 fold, about 9 fold, about 10 fold, about 15 fold, about 20 fold, including all the subranges and values that lie therebetween.

[0120] In some embodiments the recombinant microbial cell has been modified to contain a heterologous promoter operably linked to one or more endogenous PDH bypass pathway genes. In some embodiments, the heterologous promoter is a stronger promoter, as compared to the native promoter of the PDH bypass pathway gene. In some embodiments, the recombinant microbial cell is engineered to express an enzyme of the PDH bypass pathway constitutively. For instance, in some embodiments, the recombinant microbial cell may express an enzyme of the PDH bypass pathway at a time when the enzyme is not expressed by the wild type microbial cell.

[0121] In other embodiments, the present disclosure envisions overexpressing one or more PDH bypass genes by increasing the copy number of said PDH bypass gene. Thus, in some embodiments, the recombinant microbial cell comprises at least one additional copy of a DNA sequence encoding an enzyme of the PDH bypass pathway, as compared to a wild type microbial cell. In some embodiments, the recombinant microbial cell comprises at least one additional copy of a DNA sequence encoding an enzyme of PDH bypass pathway, as compared to a wild type microbial cell. In some embodiments, the recombinant microbial cell comprises 1 to 40 additional copies of a DNA sequence encoding an enzyme of the PDH bypass pathway, as compared to a wild type microbial cell. For instance, the recombinant microbial cell may comprise 1, 2, 3, 4, 5, 6, 7, 8, 9, 10, 15, 20, 25, 30, 35, or 40 additional copies of the DNA sequence, compared to a wild type microbial cell, including any ranges and subranges therebetween. In some embodiments, the recombinant microbial cell comprises 1 to 2 additional copies of a DNA sequence encoding an enzyme of the PDH bypass pathway, as compared to a wild type microbial cell. In some embodiments, the recombinant microbial cell comprises 1 to 2 additional copies of a DNA sequence encoding each of the enzymes of the PDH bypass pathway, as compared to a wild type microbial cell.

[0122] In some embodiments, the present disclosure teaches methods of increasing nepetalactol biosynthesis by expressing one or more mutant PDH bypass pathway genes. Thus, in some embodiments, the recombinant microbial cell comprises a DNA sequence encoding for one or more mutant PDH bypass pathway enzymes. In some embodiments, the one or more mutant PDH bypass pathway enzymes are more catalytically active that the corresponding wild type enzyme. In some embodiments, the one or more mutant PDH bypass pathway enzymes have a higher k_{Cat}, as compared to the wild type enzyme. In some embodiments, the one or more mutant PDH bypass pathway enzymes that are more catalytically active than the wild type enzyme, are insensitive to negative regulation, such as, for example, allosteric inhibition.

[0123] In some embodiments, the recombinant microbial cell comprises a polynucleotide encoding an enzyme of the PDH bypass pathway, wherein the polynucleotide comprises a nucleic acid sequence having at least about 80% identity to the nucleic acid sequence of the corresponding wild type form of the polynucleotide present in the wild type microbial cell. In some embodiments, the recombinant microbial cell comprises a polynucleotide comprising a nucleic acid sequence having about 80%, about 81%, about 82%, about 83%, about 84%, about 85%, about 86%, about 87%, about 88%, about 89%, about 90%, about 91%, about 92%, about 93%, about 94%, about 95%, about 96%, about 97%, about 98%, about 99%/o, or about 100% identity to the corresponding wild type form of the polynucleotide present in the wild type microbial cell, including any ranges and subranges therebetween.

[0124] In some embodiments, the recombinant microbial cell expresses an enzyme of the PDH bypass pathway, wherein the enzyme comprises an amino acid sequence comprising at least 80% identity to the sequence of the corresponding enzyme expressed by the wild type microbial cell. In some embodiments, the enzyme expressed by the recombinant microbial cell comprises an amino acid sequence having about 80%, about 81%, about 82%, about 83%, about 84%, about 85%, about 86%, about 87%, about 88%, about 89%, about 90%, about 91%, about 92%, about 93%, about 94%, about 95%, about 96%, about 97%, about 98%, about 99%, or about 100% identity to the corresponding wild type enzyme expressed by the wild type microbial cell. In some embodiments, the enzyme expressed by the recombinant microbial cell may comprise an amino acid sequence that is truncated as compared to the wild type enzyme expressed by the wild type microbial cell, including any ranges and subranges therebetween.

[0125] In some embodiments, the recombinant microbial cell expresses a recombinant enzyme of the PDH bypass pathway. In some embodiments, the recombinant enzyme is a homolog derived from another microbial species, a plant cell or a mammalian cell. In some embodiments, the homolog is more catalytically active as compared to the wild type enzyme expressed by the wild type microbial cell.

### Genetic Engineering of the Nepetalactol Pathway

[0126] In some embodiments, the recombinant microbial cell comprises one or more polynucleotide(s) encoding one or more of the enzymes of the nepetalactol synthesis pathway listed in Table 2. For instance, in some embodiments, the recombinant microbial cell comprises one or more polynucleotide(s) encoding one or more of the following enzymes of the nepetalactol synthesis pathway: geraniol diphosphate synthase (GPPS), a geranyl diphosphate diphosphatase (geraniol synthase, GES), a geraniol 8-hydroxylase (G8H), a cytochrome P450 reductase (CPR) capable of promoting regeneration of the redox state of the G8H, cytochrome B5 reductase (CYBR or CYB5R), an 8-hydroxygeraniol dehydrogenase (8HGO), an iridoid synthase (ISY) and NEPS. In some embodiments, the recombinant microbial cell comprises one or more polynucleotide(s) encoding each of the enzymes of the nepetalactol synthesis pathway listed in Table 2.

[0127] Without wishing to be bound by one theory, it is thought that the expression of one or more enzymes of the nepetalactone pathway may result in increased amounts of nepetalactol/nepetalactone/dihydronepetalactone in the recombinant microbial cells of this disclosure.

[0128] In some embodiments, the recombinant microbial cell comprises one or more polynucleotide(s) encoding cytochrome B5 (CytB5 or CYB5), which is capable of promoting the regeneration of redox state of G8H. The expression of CytB5 in a recombinant microbial cell for the production of nepetalactol/nepetalactone/dihydronepetalactone has not been described previously in the art (for example, see Campbell, Alex, Thesis, 2016), thus further distinguishing the recombinant microbial cells and the methods of this disclosure from the existing art.

[0129] In some embodiments, the recombinant microbial cell comprises 1 to 40 copies of a DNA sequence encoding an enzyme of the nepetalactol synthesis pathway. For instance, the recombinant microbial cell may comprise 1, 2, 3, 4, 5, 6, 7, 8, 9, 10, 15, 20, 25, 30, 35, or 40 copies of the DNA sequence, including all ranges and subranges therebetween. For example, in some embodiments, the recombinant microbial cell comprises at least one copy of a DNA sequence encoding one or more of the following: GPPS, GES, G8H, CPR, CytB5, CYBR, 8HGO, ISY, and NEPS. In some embodiments, the recombinant microbial cell comprises 3-5 copies of a DNA sequence encoding one or more of the following enzymes: GPPS, G8H, CPR, and CYBR In some embodiments, the recombinant microbial cell comprises 3-5 copies of a DNA sequence encoding CytB5. In some embodiments, the recombinant microbial cell comprises 6-20 copies of a DNA sequence encoding GPPS and/or G8H.

[0130] In some embodiments, the recombinant microbial cell is engineered to express one or more of the enzymes of the nepetalactol synthesis pathway listed in Table 2. In some embodiments, the recombinant microbial cell is engineered to express each of the enzymes of the nepetalactol synthesis pathway listed in Table 2.

[0131] In some embodiments, the recombinant microbial cell comprises a polynucleotide encoding GPPS, wherein the polynucleotide comprises a nucleic acid sequence having at least about 80% identity to a nucleic acid sequence selected from SEQ ID Nos. 789-927. In some embodiments, the recombinant microbial cell comprises a polynucleotide comprising a nucleic acid sequence having about 80%, about 81%, about 82%, about 83%, about 84%, about 85%, about 86%, about 87%0, about 88%, about 89%, about 90%, about 91%, about 92%, about 93%, about 94%, about 95%, about 96%, about 970, about 98%, about 990, or about 100% identity to a nucleic acid selected from SEQ ID Nos. 789-927, including all ranges and subranges therebetween.

[0132] In some embodiments, the recombinant microbial cell expresses an enzyme of the nepetalactol synthesis pathway, wherein the enzyme is GPPS, and GPPS comprises an amino acid sequence comprising at least 80% identity to an amino acid sequence selected from SEQ ID Nos. 1-139. In some embodiments, the enzyme expressed by the recombinant microbial cell comprises an amino acid sequence having about 80%, about 81%, about 82%, about 83%, about 84%, about 85%, about 86%, about 87%, about 88%, about 89%, about 90%, about 91%, about 92%, about 93%, about 94%, about 95%, about 96%, about 97%, about 98%, about 99%, or about 100% identity to an amino acid sequence selected from SEQ ID Nos. 1-139, including all ranges and subranges therebetween.

[0133] In some embodiments, the recombinant microbial cell comprises a polynucleotide encoding GES, wherein the polynucleotide comprises a nucleic acid sequence having at least about 80% identity to a nucleic acid sequence selected from SEQ ID Nos. 928-1037. In some embodiments, the recombinant microbial cell comprises a polynucleotide comprising a nucleic acid sequence having about 80%, about 81%, about 82%, about 83%, about 84%, about 85%, about 86%, about 87%, about 88%, about 89%, about 90%, about 91%, about 92%, about 93%, about 94%, about 95%, about 96%, about 97%, about 98%, about 99%, or about 100% identity to a nucleic acid selected from SEQ ID Nos. 928-1037, including all ranges and subranges therebetween.

[0134] In some embodiments, the recombinant microbial cell expresses an enzyme of the nepetalactol synthesis pathway, wherein the enzyme is GES, and GES comprises an amino acid sequence comprising at least 80% identity to an amino acid sequence selected from SEQ ID Nos. 140-249. In some embodiments, the enzyme expressed by the recombinant microbial cell comprises an amino acid sequence having about 80%, about 81%, about 82%, about 83%, about 84%, about 85%, about 86%, about 87%, about 88%, about 89%, about 90%, about 91%, about 92%, about 93%, about 94%, about 95%, about 96%, about 97%, about 98%, about 99%, or about 100% identity to an amino acid sequence selected from SEQ ID Nos. 140-249, including all ranges and subranges therebetween.

[0135] In some embodiments, the recombinant microbial cell comprises a polynucleotide encoding G8H, wherein the polynucleotide comprises a nucleic acid sequence having at least about 80% identity to a nucleic acid sequence selected from SEQ ID Nos. 1038-1072 and 1088-1110. In some embodiments, the recombinant microbial cell comprises a polynucleotide comprising a nucleic acid sequence having about 80%, about 81%, about 82%, about 83%, about 84%, about 85%, about 86%, about 87%, about 88%, about 89%, about 90%, about 91%, about 92%, about 93%, about 94%, about 95%, about 96%, about 97%, about 98%, about 99%, or about 100% identity to a nucleic acid selected from SEQ ID Nos. 1038-1072 and 1088-1110, including all ranges and subranges therebetween.

[0136] In some embodiments, the recombinant microbial cell expresses an enzyme of the nepetalactol synthesis pathway, wherein the enzyme is G8H, and G8H comprises an amino acid sequence comprising at least 80% identity to an amino acid sequence selected from SEQ ID Nos. 250-284 and 300-322. In some embodiments, the enzyme expressed by the recombinant microbial cell comprises an amino acid sequence having about 80%, about 81%, about 82%, about 83%, about 84%, about 85%, about 86%, about 87%, about 88%, about 89%, about 90%, about 91%, about 92%, about 93%, about 94%, about 95%, about 96%, about 97%, about 98%, about 99%, or about 100% identity to an amino acid sequence selected from SEQ ID Nos. 250-284 and 300-322, including all ranges and subranges therebetween.

[0137] In some embodiments, the recombinant microbial cell comprises a polynucleotide encoding CPR, wherein the polynucleotide comprises a nucleic acid sequence having at least about 80% identity to a nucleic acid sequence selected from SEQ ID Nos. 1073-1087. In some embodiments, the recombinant microbial cell comprises a polynucleotide comprising a nucleic acid sequence having about 80%, about 81%, about 82%, about 83%, about 84%, about 85%, about 86%, about 87%, about 88%, about 89%, about 90%, about 91%, about 92%, about 93%, about 94%, about 95%, about 96%, about 97%, about 98%, about 99%, or about 100% identity to a nucleic acid selected from SEQ ID Nos. 1073-1087, including all ranges and subranges therebetween.

[0138] In some embodiments, the recombinant microbial cell expresses an enzyme of the nepetalactol synthesis pathway, wherein the enzyme is CPR, and CPR comprises an amino acid sequence comprising at least 80% identity to an amino acid sequence selected from SEQ ID Nos. 285-299. In some embodiments, the enzyme expressed by the recombinant microbial cell comprises an amino acid sequence having about 80%, about 81%, about 82%, about 83%, about 84%, about 85%, about 86%, about 87%, about 88%, about 89%, about 90%, about 91%, about 92%, about 93%, about 94%, about 95%, about 96%, about 97%, about 98%, about 99%, or about 100% identity to an amino acid sequence selected from SEQ ID Nos. 285-299, including all ranges and subranges therebetween.

[0139] In some embodiments, the recombinant microbial cell comprises a polynucleotide encoding CYB5, wherein the polynucleotide comprises a nucleic acid sequence having at least about 80% identity to a nucleic acid sequence selected from SEQ ID Nos. 1111-1117. In some embodiments, the recombinant microbial cell comprises a polynucleotide comprising a nucleic acid sequence having about 80%, about 81%, about 82%, about 83%, about 84%, about 85%, about 86%, about 87%, about 88%, about 89%, about 90%, about 91%, about 92%, about 93%, about 94%, about 95%, about 96%, about 97%, about 98%, about 99%, or about 100% identity to a nucleic acid selected from SEQ ID Nos. 1111-1117, including all ranges and subranges therebetween.

[0140] In some embodiments, the recombinant microbial cell expresses an enzyme of the nepetalactol synthesis pathway, wherein the enzyme is CYB5, and CYB5 comprises an amino acid sequence comprising at least 80% identity to an amino acid sequence selected from SEQ ID Nos. 323-329. In some embodiments, the enzyme expressed by the recombinant microbial cell comprises an amino acid sequence having about 80%, about 81%, about 82%, about 83%, about 84%, about 85%, about 86%, about 87%, about 88%, about 89%, about 90%, about 91%, about 92%, about 93%, about 94%, about 95%, about 96%, about 97%, about 98%, about 99%, or about 100% identity to an amino acid sequence selected from SEQ ID Nos. 323-329.

[0141] In some embodiments, the recombinant microbial cell comprises a polynucleotide encoding 8HGO, wherein the polynucleotide comprises a nucleic acid sequence having at least about 80% identity to a nucleic acid sequence selected from SEQ ID Nos. 1118-1156. In some embodiments, the recombinant microbial cell comprises a polynucleotide comprising a nucleic acid sequence having about 80%, about 81%, about 82%, about 83%, about 84%, about 85%, about 86%, about 87%, about 88%, about 89%, about 90%, about 91%, about 92%, about 93%, about 94%, about 95%, about 96%, about 97%, about 98%, about 99%, or about 100% identity to a nucleic acid selected from SEQ ID Nos. 1118-1156, including all ranges and subranges therebetween.

[0142] In some embodiments, the recombinant microbial cell expresses an enzyme of the nepetalactol synthesis pathway, wherein the enzyme is 8HGO, and 8HGO comprises an amino acid sequence comprising at least 80% identity to an amino acid sequence selected from SEQ ID Nos. 330-368. In some embodiments, the enzyme expressed by the recombinant microbial cell comprises an amino acid sequence having about 80%, about 81%, about 82%, about 83%, about 84%, about 85%, about 86%, about 87%, about 88%, about 89%, about 90%, about 91%, about 92%, about 93%, about 94%, about 95%, about 96%, about 97%, about 98%, about 99%, or about 100% identity to an amino acid sequence selected from SEQ ID Nos. 330-368, including all ranges and subranges therebetween.

[0143] In some embodiments, the recombinant microbial cell comprises a polynucleotide encoding ISY, wherein the polynucleotide comprises a nucleic acid sequence having at least about 80% identity to a nucleic acid sequence selected from SEQ ID Nos. 1157-1307 and 1778-1807. In some embodiments, the recombinant microbial cell comprises a polynucleotide comprising a nucleic acid sequence having about 80%, about 81%, about 82%, about 83%, about 84%, about 85%, about 86%, about 87%, about 88%, about 89%, about 90%, about 91%, about 92%, about 93%, about 94%, about 95%, about 96%, about 97%, about 98%, about 99%, or about 100% identity to a nucleic acid selected from SEQ ID Nos. 1157-1307 and 1778-1807, including all ranges and subranges therebetween.

[0144] In some embodiments, the recombinant microbial cell expresses an enzyme of the nepetalactol synthesis pathway, wherein the enzyme is ISY, and ISY comprises an amino acid sequence comprising at least 80% identity to an amino acid sequence selected from SEQ ID Nos. 369-519 and 1695-1724. In some embodiments, the enzyme expressed by the recombinant microbial cell comprises an amino acid sequence having about 80%, about 81%, about 82%, about 83%, about 84%, about 85%, about 86%, about 87%, about 88%, about 89%, about 90%, about 91%, about 92%, about 93%, about 94%, about 95%, about 96%, about 97%, about 98%, about 99%, or about 100% identity to an amino acid sequence selected from SEQ ID Nos. 369-519 and 1695-1724, including all ranges and subranges therebetween.

[0145] In some embodiments, the recombinant microbial cell comprises a polynucleotide encoding CYB5R, wherein the polynucleotide comprises a nucleic acid sequence having at least about 80% identity to a nucleic acid sequence selected from SEQ ID Nos. 1571-1576. In some embodiments, the recombinant microbial cell comprises a polynucleotide comprising a nucleic acid sequence having about 80%, about 81%, about 82%, about 83%, about 84%, about 85%, about 86%, about 87%, about 88%, about 89%, about 90%, about 91%, about 92%, about 93%, about 94%, about 95%, about 96%, about 97%, about 98%, about 99%, or about 100% identity to a nucleic acid selected from SEQ ID Nos. 1571-1576, including all ranges and subranges therebetween.

[0146] In some embodiments, the recombinant microbial cell expresses an enzyme of the nepetalactol synthesis pathway, wherein the enzyme is CYB5R, and CYB5R comprises an amino acid sequence comprising at least 80% identity to an amino acid sequence selected from SEQ ID Nos. 783-788. In some embodiments, the enzyme expressed by the recombinant microbial cell comprises an amino acid sequence having about 80%, about 81%, about 82%, about 83%, about 84%, about 85%, about 86%, about 87%, about 88%, about 89%, about 90%, about 91%, about 92%, about 93%, about 94%, about 95%, about 96%, about 97%, about 98%, about 99%, or about 100% identity to an amino acid sequence selected from SEQ ID Nos. 783-788, including all ranges and subranges therebetween.

[0147] In some embodiments, the recombinant microbial cell expresses homolog of an enzyme of the nepetalactol synthesis pathway derived from another microbial species, a plant cell or a mammalian cell. In some embodiments, the homolog is selected from the nepetalactol synthesis pathway enzyme homologs listed in Table 6.

TABLE 6
An exemplary list of homologs of nepetalactol synthesis pathway enzymes

| Protein | | |
|---|---|---|
| SEQ ID | Gene | |
| NO. | name | Source organism |
| 1 | GPPS | Saccharomyces cerevisiae |
| 2 | GPPS | Saccharomyces cerevisiae |
| 3 | GPPS | Abies grandis |
| 4 | GPPS | Catharanthus roseus |
| 5 | GPPS | Picea abies |
| 6 | GPPS | Geobacillussp.WSUCF1 |
| 7 | GPPS | Saccharomyces cerevisiae(strainATCC204508/S288c)(Baker'syeast) |
| 8 | GPPS | Saccharomyces cerevisiae(strainATCC204508/S288c)(Baker'syeast) |
| 9 | GPPS | Saccharomyces cerevisiae(strainATCC204508/S288c)(Baker'syeast) |
| 10 | GPPS | Neosartorya fumigata (strain ATCC MYA-4609/Af293/CBS 101355/FGSC A1100) |
| | | (Aspergillus fumigatus) |
| 11 | GPPS | Catharanthus roseus (Madagascar periwinkle) (Vinca rosea) |
| 12 | GPPS | Rhizobium acidisoli |
| 13 | GPPS | Escherichiacoli(strainK12) |
| 14 | GPPS | Escherichiacoli(strainK12) |
| 15 | GPPS | Brucella suis (strain ATCC 23445/NCTC 10510) |
| 16 | GPPS | Arabidopsisthaliana(Mouse-earcress) |
| 17 | GPPS | Buchneraaphidicolasubsp.Acyrthosiphonpisum(strainAPS)(Acyrthosiphonpisumsymbioticbacterium) |
| 18 | GPPS | Dendroctonus ponderosae (Mountain pine beetle) |
| 19 | GPPS | Picea abies (Norway spruce) (Picea excelsa) |
| 20 | GPPS | Abies grandis (Grand fir) (Pinus grandis) |
| 21 | GPPS | Corynebacterium glutamicum (strain ATCC 13032/DSM 20300/JCM 1318/LMG 3730/NCIMB 10025) |
| 22 | GPPS | Vitisvinifera(Grape) |
| 23 | GPPS | Picea abies (Norway spruce) (Picea excelsa) |
| 24 | GPPS | Picea abies (Norway spruce) (Picea excelsa) |
| 25 | GPPS | Sus scrofa (Pig) |
| 26 | GPPS | Acyrthosiphon pisum (Pea aphid) |
| 27 | GPPS | Mycobacteriumtuberculosis |
| 28 | GPPS | Staphylococcus aureus (strain NCTC 8325) |
| 29 | GPPS | Geobacillussp.WSUCF1 |
| 30 | GPPS | Saccharomycescerevisiae(strainATCC204508/S288c)(Baker'syeast) |
| 31 | GPPS | Neosartorya fumigata (strain ATCC MYA-4609/Af293/CBS 101355/FGSC A1100) |
| | | (Aspergillus fumigatus) |
| 32 | GPPS | Neosartorya fumigata (strain ATCC MYA-4609/Af293/CBS 101355/FGSC A1100) |
| | | (Aspergillus fumigatus) |
| 33 | GPPS | Catharanthus roseus (Madagascar periwinkle) (Vinca rosea) |
| 34 | GPPS | Rhizobium acidisoli |
| 35 | GPPS | Escherichiacoli(strainK12) |
| 36 | GPPS | Brucella suis (strain ATCC 23445/NCTC 10510) |
| 37 | GPPS | Arabidopsisthaliana(Mouse-earcress) |
| 38 | GPPS | Buchneraaphidicolasubsp.Acyrthosipbonpisum(strainAPS)(Acyrthosiphonpisumsymbioticbacterium) |
| 39 | GPPS | Dendroctonus ponderosae (Mountain pine beetle) |
| 40 | GPPS | Picea abies (Norway spruce) (Picea excelsa) |
| 41 | GPPS | Abies grandis (Grand fir) (Pinus grandis) |
| 42 | GPPS | Corynebacterium glutamicum (strain ATCC 13032/DSM 20300/JCM 1318/LMG 3730/NCIMB 10025) |
| 43 | GPPS | Vitisvinifera(Grape) |
| 44 | GPPS | Picea abies (Norway spruce) (Picea excelsa) |
| 45 | GPPS | Picea abies (Norway spruce) (Picea excelsa) |
| 46 | GPPS | Picea abies (Norway spruce) (Picea excelsa) |
| 47 | GPPS | Picea abies (Norway spruce) (Picea excelsa) |
| 48 | GPPS | Picea abies (Norway spruce) (Picea excelsa) |
| 49 | GPPS | Sus scrofa (Pig) |
| 50 | GPPS | Acyrthosiphon pisum (Pea aphid) |
| 51 | GPPS | Mycobacteriumtuberculosis |
| 52 | GPPS | Staphylococcus aureus (strain NCTC 8325) |
| 53 | GPPS | Geobacillussp.WSUCF1 |
| 54 | GPPS | Geobacillussp.WSUCF1 |
| 55 | GPPS | Geobaciliussp.WSUCF1 |
| 56 | GPPS | Geobacillussp.WSUCF1 |
| 57 | GPPS | Rhizobium acidisoli |
| 58 | GPPS | Rhizobium acidisoli |
| 59 | GPPS | Rhizobium acidisoli |
| 60 | GPPS | Escherichiacoli(strainK12) |
| 61 | GPPS | Escherichiacoli(strainK12) |
| 62 | GPPS | Escherichiacoli(strainK12) |
| 63 | GPPS | Brucella suis (strain ATCC 23445/NCTC 10510) |
| 64 | GPPS | Brucella suis (strain ATCC 23445/NCTC 10510) |
| 65 | GPPS | Buchneraaphidicolasubsp.Acyrthosiphonpisum(strainAPS)(Acyrthosiphonpisumsymbioticbacterium) |
| 66 | GPPS | Buchneraaphidicolasubsp.Acyrthosiphonpisum(strainAPS)(Acyrthosiphonpisumsymbioticbacterium) |
| 67 | GPPS | Buchneraaphidicolasubsp.Acyrthosiphonpisum(strainAPS)(Acyrthosiphonpisumsymbioticbacterium) |
| 68 | GPPS | Dendroctonus ponderosae (Mountain pine beetle) |
| 69 | GPPS | Picea abies (Norway spruce) (Picea excelsa) |
| 70 | GPPS | Picea abies (Norway spruce) (Picea excelsa) |
| 71 | GPPS | Picea abies (Norway spruce) (Picea excelsa) |
| 72 | GPPS | Abies grandis (Grand fir) (Pinus grandis) |
| 73 | GPPS | Abies grandis (Grand fir) (Finns grandis) |
| 74 | GPPS | Abies grandis (Grand fir) (Pinus grandis) |
| 75 | GPPS | Picea abies (Norway spruce) (Picea excelsa) |
| 76 | GPPS | Picea abies (Norway spruce) (Picea excelsa) |
| 77 | GPPS | Picea abies (Norway spruce) (Picea excelsa) |
| 78 | GPPS | Sus scrofa (Pig) |
| 79 | GPPS | Staphylococcus aureus (strain NCTC 8325) |
| 80 | GPPS | Staphylococcus aureus (strain NCTC 8325) |
| 81 | GPPS | Staphylococcus aureus (strain NCTC 8325) |
| 82 | GPPS | Geobacillussp.WSUCF1 |
| 83 | GPPS | Saccharomycescerevisiae(strainATCC204508/S288c)(Baker'syeast) |
| 84 | GPPS | Neosartorya fumigata (strain ATCC MYA-4609/A1293/CBS 101355/FGSC A1100) |
| | | (Aspergillus fumigatus) |
| 85 | GPPS | Catharanthus roseus (Madagascar periwinkle) (Vinca rosea) |
| 86 | GPPS | Catharanthus roseus (Madagascar periwinkle) (Vinca rosea) |
| 87 | GPPS | Catharanthus roseus (Madagascar periwinkle) (Vinca rosea) |
| 88 | GPPS | Rhizobium acidisoli |
| 89 | GPPS | Escherichiacoli(strainK12) |
| 90 | GPPS | Brucella suis (strain ATCC 23445/NCTC 10510) |
| 91 | GPPS | Arabidopsisthaliana(Mouse-earcress) |
| 92 | GPPS | Arabidopsisthaliana(Mouse-earcress) |
| 93 | GPPS | Arabidopsisthaliana(Mouse-earcress) |
| 94 | GPPS | Buchneraaphidicolasubsp.Acyrthosiphonpisum(strainAPS)(Acyrthosiphonpisumsymbioticbacterium) |
| 95 | GPPS | Dendroctonus ponderosae (Mountain pine beetle) |
| 96 | GPPS | Picea abies (Norway spruce) (Picea excelsa) |
| 97 | GPPS | Abies grandis (Grand fir) (Pinus grandis) |
| 98 | GPPS | Corynebacterium glutamicum (strain ATCC 13032/DSM 20300/JCM 1318/LMG 3730/NC1MB 10025) |
| 99 | GPPS | Vitisvinifera(Grape) |
| 100 | GPPS | Vitisvinifera(Grape) |
| 101 | GPPS | Vitisvinifera(Grape) |
| 102 | GPPS | Picea abies (Norway spruce) (Picea excelsa) |
| 103 | GPPS | Sus scrofa (Pig) |
| 104 | GPPS | Acyrthosiphon pisum (Pea aphid) |
| 105 | GPPS | Mycobacteriumtuberculosis |
| 106 | GPPS | Mycobacteriumtuberculosis |
| 107 | GPPS | Mycobacteriumtuberculosis |
| 108 | GPPS | Staphylococcus aureus (strain NCTC 8325) |
| 109 | GPPS | Picea abies |
| 110 | GPPS | Abies grandis |
| 111 | GPPS | Catharanthus roseus |
| 112 | GPPS | Picea abies |
| 113 | GPPS | Abies grandis |
| 114 | GPPS | Catharanthus roseus |
| 115 | GPPS | Abies grandis |
| 116 | GPPS | Catharanthus roseus and S. cerevisiae |
| 117 | GPPS | Picea abies |
| 118 | GPPS | Humulus lupulus |
| 119 | GPPS | Humulus lupulus |
| 120 | GPPS | Mentha × piperita |
| 121 | GPPS | Mentha × piperita |
| 122 | GPPS | Catharanthus roseus |
| 123 | GPPS | Catharanthus roseus |
| 124 | GPPS | Nepeta cataria |
| 125 | GPPS | Nepeta cataria |
| 126 | GPPS | Streptomyces aculeolatus |
| 127 | GPPS | Streptomyces sp. KO-3988 |
| 128 | GPPS | Streptomyces cinnamonensis |
| 129 | GPPS | Streptomyces longwoodensis |
| 130 | GPPS | Streptomyces sp. GKU 895 |
| 131 | GPPS | Streptomyces sp. NRRL S-37 |
| 132 | GPPS | Streptomyces aculeolatus |
| 133 | GPPS | Streptomyces sp. KO-3988 |
| 134 | GPPS | Streptomyces cinnamonensis |
| 135 | GPPS | Streptomyces longwoodensis |
| 136 | GPPS | Streptomyces sp. GKU 895 |
| 137 | GPPS | Streptomyces sp. NRRL S-37 |
| 138 | GPPS | Penicillium aethiopicum |
| 139 | GPPS | Penicillium aethiopicum |
| 140 | GES | Ocimum basilicum (Sweet basil) |
| 141 | GES | Catharanthus roseus |
| 142 | GES | Ocimum basilicum |
| 143 | GES | Valeriana officinalis |
| 144 | GES | Catharanthus roseus |
| 145 | GES | Ocimum basilicum |
| 146 | GES | Valeriana officinalis |
| 147 | GES | Catharanthus roseus |
| 148 | GES | Ocimum basilicum |
| 149 | GES | Perilla citriodora |
| 150 | GES | Valeriana officinalis |
| 151 | GES | Rosa hybrid cultivar |
| 152 | GES | Arabidopsis thaliana |
| 153 | GES | Catharanthus roseus |
| 154 | GES | Ocimum basilicum |
| 155 | GES | Perilla citriodora |
| 156 | GES | Valeriana officinalis |
| 157 | GES | Vinca minor |
| 158 | GES | Cinchona pubescens |
| 159 | GES | Rauvolfia serpentina |
| 160 | GES | Swertia japonica |
| 161 | GES | Coffea canephora |
| 162 | GES | Citrus unshiu |
| 163 | GES | Citrus unshiu |
| 164 | GES | Glycine soja |
| 165 | GES | Cynara cardunculus var. scolymus |
| 166 | GES | Dorcoceras hygrometricum |
| 167 | GES | Dorcoceras hygrometricum |
| 168 | GES | Helianthus annuus |
| 169 | GES | Actinidia chinensis var. chinensis |
| 170 | GES | Cinchona ledgeriana |
| 171 | GES | Lonicera japonica |
| 172 | GES | Cinchona pubescens |
| 173 | GES | Nepeta mussinii |
| 174 | GES | Nepeta cataria |
| 175 | GES | Nepeta cataria |
| 176 | GES | Phyla dulcis |
| 177 | GES | Vitis vinifera |
| 178 | GES | Catharanthus roseus |
| 179 | GES | Olea europaea |
| 180 | GES | Valeriana officinalis |
| 181 | GES | Valeriana officinalis |
| 182 | GES | Valeriana officinalis |
| 183 | GES | Pogostemon cablin |
| 184 | GES | Picrorhiza kurrooa |
| 185 | GES | Gentiana rigescens |
| 186 | GES | Camptotheca acuminata |
| 187 | GES | Osmanthus fragrans |
| 188 | GES | synthetic construct |
| 189 | GES | Phaseolus lunatus |
| 190 | GES | unknown |
| 191 | GES | Vigna angularis var. angularis |
| 192 | GES | Vitis vinifera |
| 193 | GES | Coffea arabica |
| 194 | GES | Coffea canephora |
| 195 | GES | Glycine soja |
| 196 | GES | Glycine soja |
| 197 | GES | Vigna angularis |
| 198 | GES | Glycine max |
| 199 | GES | Cajanus cajan |
| 200 | GES | Cajanus cajan |
| 201 | GES | Vitis vinifera |
| 202 | GES | Vitis vinifera |
| 203 | GES | Glycine max |
| 204 | GES | Lupinus angustifolius |
| 205 | GES | Handroanthus impetiginosus |
| 206 | GES | Handroanthus impetiginosus |
| 207 | GES | Lactuca sativa |
| 208 | GES | Parasponia andersonii |
| 209 | GES | Trema orientalis |
| 210 | GES | unknown |
| 211 | GES | unknown |
| 212 | GES | Ricinus communis |
| 213 | GES | Medicago truncatula |
| 214 | GES | Cicer arietinum |
| 215 | GES | Glycine max |
| 216 | GES | Glycine max |
| 217 | GES | Phaseolus vulgaris |
| 218 | GES | Phaseolus vulgaris |
| 219 | GES | Phaseolus vulgaris |
| 220 | GES | Morus notabilis |
| 221 | GES | Vitis vinifera |
| 222 | GES | Sesamum indicum |
| 223 | GES | Jatropha curcas |
| 224 | GES | Erythranthe guttata |
| 225 | GES | Vigna radiata var. radiata |
| 226 | GES | Vigna radiata var. radiata |
| 227 | GES | Arachis duranensis |
| 228 | GES | Vigna angularis |
| 229 | GES | Vigna angularis |
| 230 | GES | Lupinus angustifolius |
| 231 | GES | Cajanus cajan |
| 232 | GES | Cajanus cajan |
| 233 | GES | Manihot esculenta |
| 234 | GES | Hevea brasiliensis |
| 235 | GES | Helianthus annuus |
| 236 | GES | Olea europaea var. sylvestris |
| 237 | GES | Lactuca sativa |
| 238 | GES | Citrus clementina |
| 239 | GES | Medicago truncatula |
| 240 | GES | Cicer arietinum |
| 241 | GES | Citrus sinensis |
| 242 | GES | Vigna angularis |
| 243 | GES | Helianthus annuus |
| 244 | GES | Helianthus annuus |
| 245 | GES | Helianthus annuus |
| 246 | GES | Olea europaea var. sylvestris |
| 247 | GES | Olea europaea var. sylvestris |
| 248 | GES | Olea europaea var. sylvestris |
| 249 | GES | Olea europaea var. sylvestris |
| 250 | G8H | Catharanthus roseus |
| 251 | G8H | Catharanthus roseus |
| 252 | G8H | Catharanthus roseus |
| 253 | G8H | Catharanthus roseus |
| 254 | G8H | Catharanthus roseus |
| 255 | G8H | Catharanthus roseus |
| 256 | G8H | Catharanthus roseus |
| 257 | G8H | Catharanthus roseus |
| 258 | G8H | Catharanthus roseus |
| 259 | G8H | Catharanthus roseus |
| 260 | G8H | Catharanthus roseus |
| 261 | G8H | Catharanthus roseus |
| 262 | G8H | Catharanthus roseus |
| 263 | G8H | Catharanthus roseus |
| 264 | G8H | Nepeta cataria |
| 265 | G8H | Nepeta mussinii |
| 266 | G8H | Nepeta cataria |
| 267 | G8H | Nepeta mussinii |
| 268 | G8H | Nepeta cataria |
| 269 | G8H | Nepeta mussinii |
| 270 | G8H | Nepeta cataria |
| 271 | G8H | Nepeta mussinii |
| 272 | G8H | Vigna angularis |
| 273 | G8H | Bacillus megaterium NBRC 15308 |
| 274 | G8H | Bacillus megaterium NBRC 15308 |
| 275 | G8H | Camptotheca acuminata |
| 276 | G8H | Vinca minor |
| 277 | G8H | Ophiorrhiza pumila |
| 278 | G8H | Rauvolfia serpentina |
| 279 | G8H | Lonicera japonica |
| 280 | G8H | Erythranthe guttata |
| 281 | G8H | Picrorhiza kurrooa |
| 282 | G8H | Olea europaea |
| 283 | G8H | Gentiana rigescens |
| 284 | G8H | Nepeta cataria |
| 285 | CPR | Arabidopsis thaliana |
| 286 | CPR | Catharanthus roseus |
| 287 | CPR | Catharanthus roseus |
| 288 | CPR | Arabidopsis thaliana |
| 289 | CPR | Catharanthus roseus |
| 290 | CPR | Arabidopsis thaliana |
| 291 | CPR | Catharanthus roseus |
| 292 | CPR | Nepeta mussinii |
| 293 | CPR | Camptotheca acuminata |
| 294 | CPR | Arabidopsis thaliana |
| 295 | CPR | Arabidopsis thaliana |
| 296 | CPR | Nepeta mussinii |
| 297 | CPR | Camptotheca acuminata |
| 298 | CPR | Nepeta mussinii |
| 299 | CPR | Camptotheca acuminata |
| 300 | G8H | Swertia mussotii |
| 301 | G8H | Camptotheca acuminata |
| 302 | G8H | Lonicera japonica |
| 303 | G8H | Erythranthe guttata |
| 304 | G8H | Erythranthe guttata |
| 305 | G8H | Nepeta cataria |
| 306 | G8H | Picrorhiza kurrooa |
| 307 | G8H | Picrorhiza kurrooa |
| 308 | G8H | Nepeta mussinii |
| 309 | G8H | Olea europaea |
| 310 | G8H | Sesamum indicum |
| 311 | G8H | Coffea canephora |
| 312 | G8H | Dorcoceras hygrometricum |
| 313 | G8H | Gentiana rigescens |
| 314 | G8H | Vinca minor |
| 315 | G8H | Ophiorrhiza pumila |
| 316 | G8H | Rauvolfia serpentina |
| 317 | G8H | Cinchona calisaya |
| 318 | G8H | Tabernaemontana elegans |
| 319 | G8H | Catharanthus roseus |
| 320 | G8H | Catharanthus roseus |
| 321 | G8H | Catharanthus roseus |
| 322 | G8H | Catharanthus roseus |
| 323 | CYB5 | Catharanthus roseus |
| 324 | CYB5 | Yarrowia lipolytica CLIB122 |
| 325 | CYB5 | Nepeta cataria |
| 326 | CYB5 | Catharanthus roseus |
| 327 | CYB5 | Nepeta cataria |
| 328 | CYB5 | Artemesia annua |
| 329 | CYB5 | Arabidopsis thaliana |
| 330 | 8HGO | Catharanthus roseus (Madagascar periwinkle) (Vinca rosea) |
| 331 | 8HGO | Catharanthus roseus |
| 332 | 8HGO | Nepeta cataria |
| 333 | 8HGO | Sesamum indicum |
| 334 | 8HGO | Camptotheca acuminata |
| 335 | 8HGO | Sesamum indicum |
| 336 | 8HGO | Swertia japonica |
| 337 | 8HGO | Ophiorrhiza pumila |
| 338 | 8HGO | Cinchona ledgeriana |
| 339 | 8HGO | Lonicera japonica |
| 340 | 8HGO | Coffea canephora |
| 341 | 8HGO | Rauvolfia serpentina |
| 342 | 8HGO | Gentiana rigescens |
| 343 | 8HGO | Catharanthus roseus |
| 344 | 8HGO | Nepeta cataria |
| 345 | 8HGO | Ocimum basilicum |
| 346 | 8HGO | Sesamum indicum |
| 347 | 8HGO | Capsicum annuum |
| 348 | 8HGO | Camptotheca acuminata |
| 349 | 8HGO | Solanum tuberosum |
| 350 | 8HGO | Sesamum indicum |
| 351 | 8HGO | Swertia japonica |
| 352 | 8HGO | Ophiorrhiza pumila |
| 353 | 8HGO | Cinchona ledgeriana |
| 354 | 8HGO | Lonicera japonica |
| 355 | 8HGO | Coffea canephora |
| 356 | 8HGO | Rauvolfia serpentina |
| 357 | 8HGO | Gentiana rigescens |
| 358 | 8HGO | Catharanthus roseus |
| 359 | 8HGO | Olea europaea subsp. europaea |
| 360 | 8HGO | Sesamum indicum |
| 361 | 8HGO | Olea europaea |
| 362 | 8HGO | Erythranthe guttata |
| 363 | 8HGO | Catharanthus roseus |
| 364 | 8HGO | Ocimum basilicum |
| 365 | 8HGO | Camptotheca acuminata |
| 366 | 8HGO | Swertia japonica |
| 367 | 8HGO | Cinchona ledgeriana |
| 368 | 8HGO | Rauvolfia serpentina |
| 369 | ISY | Arabidopsis thaliana (Mouse-earcress) |
| 370 | ISY | Digitalis lanata (Grecian foxglove) |
| 371 | ISY | Nepeta mussinii |
| 372 | ISY | Nepeta cataria |
| 373 | ISY | Catharanthus roseus (Madagascar periwinkle) (Vinca rosea) |
| 374 | ISY | Catharanthus roseus |
| 375 | ISY | Nepeta mussinii |
| 376 | ISY | Nepeta cataria |
| 377 | ISY | Olea europaea |
| 378 | ISY | Catharanthus roseus |
| 379 | ISY | Nepeta mussinii |
| 380 | ISY | Nepeta cataria |
| 381 | ISY | Nicotiana tabacum |
| 382 | ISY | Elaeis guineensis |
| 383 | ISY | Citrus clementina |
| 384 | ISY | Sesamum indicum |
| 385 | ISY | Camptotheca acuminata |
| 386 | ISY | Cinchona pubescens |
| 387 | ISY | Ophiorrhiza pumila |
| 388 | ISY | Lonicera japonica |
| 389 | ISY | Digitalis purpurea |
| 390 | ISY | Antirrhinum majus |
| 391 | ISY | Trifolium subterraneum |
| 392 | ISY | Corchorus capsularis |
| 393 | ISY | Nicotiana tabacum |
| 394 | ISY | Panicum hallii |
| 395 | ISY | Medicago truncatula |
| 396 | ISY | Juglans regia |
| 397 | ISY | Triticum urartu |
| 398 | ISY | Citrus clementina |
| 399 | ISY | Panicum hallii |
| 400 | ISY | Prunus persica |
| 401 | ISY | Tarenaya hassleriana |
| 402 | ISY | Capsicum baccatum |
| 403 | ISY | Medicago truncatula |
| 404 | ISY | Nicotiana sylvestris |
| 405 | ISY | Oryza sativa Japonica Group |
| 406 | ISY | Oryza sativa Japonica Group |
| 407 | ISY | Cynara cardunculus var. scolymus |
| 408 | ISY | Ornithogalum longebracteatum |
| 409 | ISY | Allium ursinum |
| 410 | ISY | Convallaria majalis |
| 411 | ISY | Populus trichocarpa |
| 412 | ISY | Sorghum bicolor |
| 413 | ISY | Zea mays |
| 414 | ISY | Daucus carota subsp. sativus |
| 415 | ISY | Nepeta cataria |
| 416 | ISY | Catharanthus roseus |
| 417 | ISY | Dichanthelium oligosanthes |
| 418 | ISY | Sorghum bicolor |
| 419 | ISY | Tarenaya hassleriana |
| 420 | ISY | Citrus sinensis |
| 421 | ISY | Picea sitchensis |
| 422 | ISY | Cajanus cajan |
| 423 | ISY | Citrus clementina |
| 424 | ISY | Aquilegia coerulea |
| 425 | ISY | Lonicera japonica |
| 426 | ISY | Olea europaea subsp. europaea |
| 427 | ISY | Thlaspi densiflorum |
| 428 | ISY | Stellaria media |
| 429 | ISY | Erysimum crepidifolium |
| 430 | ISY | Morus notabilis |
| 431 | ISY | Helianthus annuus |
| 432 | ISY | Capsicum annuum |
| 433 | ISY | Macleaya cordata |
| 434 | ISY | Citrus clementina |
| 435 | ISY | Arachis ipaensis |
| 436 | ISY | Vitis vinifera |
| 437 | ISY | Hevea brasiliensis |
| 438 | ISY | Dorcoceras hygrometricum |
| 439 | ISY | Brassica napus |
| 440 | ISY | Ziziphus jujuba |
| 441 | ISY | Punica granatum |
| 442 | ISY | Capsicum baccatum |
| 443 | ISY | Carica papaya |
| 444 | ISY | Gossypium hirsutum |
| 445 | ISY | Cucumis sativus |
| 446 | ISY | Citrus clementina |
| 447 | ISY | Catharanthus roseus |
| 448 | ISY | Fragaria vesca subsp. vesca |
| 449 | ISY | Prunus avium |
| 450 | ISY | Salvia rosmarinus |
| 451 | ISY | Elaeis guineensis |
| 452 | ISY | Erythranthe guttata |
| 453 | ISY | Helianthus annuus |
| 454 | ISY | Genlisea aurea |
| 455 | ISY | Arabidopsis thaliana |
| 456 | ISY | Lupinus angustifolius |
| 457 | ISY | Ananas comosus |
| 458 | ISY | Beta vulgaris subsp. vulgaris |
| 459 | ISY | Gossypium raimondii |
| 460 | ISY | Citrus sinensis |
| 461 | ISY | Amborella trichopoda |
| 462 | ISY | Musa acuminata subsp. malaccensis |
| 463 | ISY | Zostera marina |
| 464 | ISY | Cephalotus follicularis |
| 465 | ISY | Ipomoea nil |
| 466 | ISY | Ricinus communis |
| 467 | ISY | Elaeis guineensis |
| 468 | ISY | Citrus clementina |
| 469 | ISY | Musa acuminata subsp. malaccensis |
| 470 | ISY | Theobroma cacao |
| 471 | ISY | Gomphocarpus fruticosus |
| 472 | ISY | Lupinus angustifoiius |
| 473 | ISY | Brachypodium distachyon |
| 474 | ISY | Oryza brachyantha |
| 475 | ISY | Catharanthus roseus |
| 476 | ISY | Populus euphratica |
| 477 | ISY | Catharanthus roseus |
| 478 | ISY | Prunus mume |
| 479 | ISY | Ziziphus jujuba |
| 480 | ISY | Prunus persica |
| 481 | ISY | Sesamum indicum |
| 482 | ISY | Panicum hallii |
| 483 | ISY | Fragaria vesca subsp. vesca |
| 484 | ISY | Setaria italica |
| 485 | ISY | Populus trichocarpa |
| 486 | ISY | Juglans regia |
| 487 | ISY | Jatropha curcas |
| 488 | ISY | Hevea brasiliensis |
| 489 | ISY | Camptotheca acuminata |
| 490 | ISY | Malus domestica |
| 491 | ISY | Panicum hallii |
| 492 | ISY | Arachis duranensis |
| 493 | ISY | Catharanthus roseus |
| 494 | ISY | Spinacia oleracea |
| 495 | ISY | Trifolium subterraneum |
| 496 | ISY | Ziziphus jujuba |
| 497 | ISY | Medicago truncatula |
| 498 | ISY | Medicago truncatula |
| 499 | ISY | Medicago truncatula |
| 500 | ISY | Spinacia oleracea |
| 501 | ISY | Juglans regia |
| 502 | ISY | Populus tremuloides |
| 503 | ISY | Vitis vinifera |
| 504 | ISY | Vitis vinifera |
| 505 | ISY | Daucus carota subsp. sativus |
| 506 | ISY | Dendrobium catenatum |
| 507 | ISY | Passiflora incarnata |
| 508 | ISY | Prunus avium |
| 509 | ISY | Daucus carota subsp. sativus |
| 510 | ISY | Solanum tuberosum |
| 511 | ISY | Setaria italica |
| 512 | ISY | Antirrhinum majus |
| 513 | ISY | Coffea canephora |
| 514 | ISY | Panicum hallii |
| 515 | ISY | Oryza sativa Japonica Group |
| 516 | ISY | Setaria italica |
| 517 | ISY | Sesamum indicum |
| 518 | ISY | Digitalis purpurea |
| 519 | ISY | Digitalis lanata |
| 783 | CYB5R | Catharanthus roseus |
| 784 | CYB5R | Nepeta cataria |
| 785 | CYB5R | Arabidopsis thaliana |
| 786 | CYB5R | Catharanthus roseus |
| 787 | CYB5R | Nepeta cataria |
| 788 | CYB5R | Arabidopsis thaliana |
| 1695 | ISY | Phialophora attae |
| 1696 | ISY | Tarenaya spinosa |
| 1697 | ISY | Trifolium pratense |
| 1698 | ISY | Oryza glumipatula |
| 1699 | ISY | Triticum aestivum |
| 1700 | ISY | Oryza glumipatula |
| 1701 | ISY | Madurella mycetomatis |
| 1702 | ISY | Phaedon cochleariae |
| 1703 | ISY | Glycine max |
| 1704 | ISY | Triticum aestivum |
| 1705 | ISY | Olea europaea |
| 1706 | ISY | Camptotheca acuminata |
| 1707 | ISY | Musa acuminata subsp. malaccensis |
| 1708 | ISY | Arabidopsis thaliana |
| 1709 | ISY | Digitalis lanata |
| 1710 | ISY | Musa acuminata subsp. malaccensis |
| 1711 | ISY | Musa acuminata subsp. malaccensis |
| 1712 | ISY | Anthurium amnicola |
| 1713 | ISY | Cinchona_{—}Ledgeriana |
| 1714 | ISY | Triticum aestivum |
| 1715 | ISY | Aegilops tauschii |
| 1716 | ISY | Vinca minor |
| 1717 | ISY | Cinchona pubescens |
| 1718 | ISY | Ophiorrhiza pumila |
| 1719 | ISY | Swertia japonica |
| 1720 | ISY | Lonicera_{—}japonica |
| 1721 | ISY | Rauwolfia serpentina |
| 1722 | ISY | Lonicera japonica |
| 1723 | ISY | Oryza sativa subsp. japonica |
| 1724 | ISY | Phaedon cochleariae |

[0148] In some embodiments, the recombinant microbial cell is engineered to express a fusion protein comprising one or more enzymes of the nepetalactol synthesis pathway. The fusion protein may comprise one or more of any one of the enzymes of the nepetalactol synthesis pathway disclosed herein. Without being bound by theory, it is thought that fusion proteins comprising one or more enzymes of the nepetalactol synthesis pathway may increase the flux through the nepetalactol synthesis pathway by enhancing the catalytic efficiency of the fused enzymes. For example, if enzyme 1 (E1) and enzyme 2 (E2) are enzymes of the nepetalactol synthesis pathway, wherein product of E1 is the substrate of E2, then it is thought that an engineered fusion of E1 and E2 may improve the access of E2 to its substrate, due to E2's proximity to E1.

[0149] In some embodiments, the recombinant microbial cell is engineered to express a fusion protein comprising GPPS and GES of the nepetalactol synthesis pathway. In some embodiments, the fusion protein comprising GPPS and GES comprises an amino acid sequence comprising at least 80% identity to an amino acid sequence selected from SEQ ID Nos. 608, 609, and 1645-1694. In some embodiments, the fusion protein comprises an amino acid sequence having about 80%, about 81%, about 82%, about 83%, about 84%, about 85%, about 86%, about 87%, about 88%, about 89%, about 90%, about 91%, about 92%, about 93%, about 94%, about 95%, about 96%, about 97%, about 98%, about 99%, or about 100% identity to an amino acid sequence selected from SEQ ID Nos. 608, 609, and 1645-1694, including all ranges and subranges therebetween. In some embodiments, the recombinant microbial cell comprises a polynucleotide encoding the fusion protein, wherein the polynucleotide comprises a nucleic acid sequence having at least about 80% identity to a nucleic acid sequence selected from SEQ ID Nos. 1396, 1397, and 1728-1777. In some embodiments, the recombinant microbial cell comprises a polynucleotide comprising a nucleic acid sequence having about 80%, about 81%, about 82%, about 83%, about 84%, about 85%, about 86%, about 87%, about 88%, about 89%, about 90%, about 91%, about 92%, about 93%, about 94%, about 95%, about 96%, about 97%, about 98%, about 99%, or about 100% identity to a nucleic acid selected from SEQ ID Nos. 1396, 1397, and 1728-1777, including all ranges and subranges therebetween.

[0150] In some embodiments, the recombinant microbial cell is engineered to express a fusion protein comprising G8H and CPR of the nepetalactol synthesis pathway. In some embodiments, the fusion protein comprising G8H and CPR comprises an amino acid sequence comprising at least 80% identity to an amino acid sequence selected from SEQ ID Nos. 610-674. In some embodiments, the fusion protein comprises an amino acid sequence having about 80%, about 81%, about 82%, about 83%, about 84%, about 85%, about 86%, about 87%, about 88%, about 89%, about 90%, about 91%, about 92%, about 93%, about 94%, about 95%, about 96%, about 97%, about 98%, about 99%, or about 100% identity to an amino acid sequence selected from SEQ ID Nos. 610-674, including all ranges and subranges therebetween. In some embodiments, the recombinant microbial cell comprises a polynucleotide encoding the fusion protein, wherein the polynucleotide comprises a nucleic acid sequence having at least about 80% identity to a nucleic acid sequence selected from SEQ ID Nos. 1398-1462. In some embodiments, the recombinant microbial cell comprises a polynucleotide comprising a nucleic acid sequence having about 80%, about 81%, about 82%, about 83%, about 84%, about 85%, about 86%, about 87%, about 88%, about 89%, about 90%, about 91%, about 92%, about 93%, about 94%, about 95%, about 96%, about 97%, about 98%, about 99%, or about 100% identity to a nucleic acid selected from SEQ ID Nos. 1398-1462, including all ranges and subranges therebetween.

[0151] In some embodiments, the recombinant microbial cell is engineered to express a fusion protein comprising G8H, CPR and CYB5 of the nepetalactol synthesis pathway. In some embodiments, the fusion protein comprising G8H, CPR and CYB5 comprises an amino acid sequence comprising at least 80% identity to an amino acid sequence selected from SEQ ID Nos. 675-693. In some embodiments, the fusion protein comprises an amino acid sequence having about 80%, about 81%, about 82%, about 83%, about 84%, about 85%, about 86%, about 87%, about 88%, about 89%, about 90%, about 91%, about 92%, about 93%, about 94%, about 95%, about 96%, about 97%, about 98%, about 99%, or about 100% identity to an amino acid sequence selected from SEQ ID Nos. 675-693, including all ranges and subranges therebetween. In some embodiments, the recombinant microbial cell comprises a polynucleotide encoding the fusion protein, wherein the polynucleotide comprises a nucleic acid sequence having at least about 80% identity to a nucleic acid sequence selected from SEQ ID Nos. 1463-1481. In some embodiments, the recombinant microbial cell comprises a polynucleotide comprising a nucleic acid sequence having about 80%, about 81%, about 82%, about 83%, about 84%, about 85%, about 86%, about 87%, about 88%, about 89%, about 90%, about 91%, about 92%, about 93%, about 94%, about 95%, about 96%, about 97%, about 98%, about 99%, or about 100% identity to a nucleic acid selected from SEQ ID Nos. 1463-1481, including all ranges and subranges therebetween.

[0152] In some embodiments, the recombinant microbial cell is engineered to express a fusion protein comprising 8HGO and ISY of the nepetalactol synthesis pathway. In some embodiments, the fusion protein comprising 8HGO and ISY comprises an amino acid sequence comprising at least 80% identity to an amino acid sequence selected from SEQ ID Nos. 694-705. In some embodiments, the fusion protein comprises an amino acid sequence having about 80%, about 81%, about 82%, about 83%, about 84%, about 85%, about 86%, about 87%, about 88%, about 89%, about 90%, about 91%, about 92%, about 93%, about 94%, about 95%, about 96%, about 97%, about 98%, about 99%, or about 100% identity to an amino acid sequence selected from SEQ ID Nos. 694-705, including all ranges and subranges therebetween. In some embodiments, the recombinant microbial cell comprises a polynucleotide encoding the fusion protein, wherein the polynucleotide comprises a nucleic acid sequence having at least about 80% identity to a nucleic acid sequence selected from SEQ ID Nos. 1482-1493. In some embodiments, the recombinant microbial cell comprises a polynucleotide comprising a nucleic acid sequence having about 80%, about 81%, about 82%, about 83%, about 84%, about 85%, about 86%, about 87%, about 88%, about 89%, about 90%, about 91%, about 92%, about 93%, about 94%, about 95%, about 96%, about 97%, about 98%, about 99%, or about 100% identity to a nucleic acid selected from SEQ ID Nos. 1482-1493, including all ranges and subranges therebetween.

[0153] In some embodiments, the recombinant microbial cell is engineered to express a fusion protein comprising ISY and NEPS of the nepetalactol synthesis pathway. In some embodiments, the fusion protein comprising ISY and NEPS comprises an amino acid sequence comprising at least 80% identity to an amino acid sequence selected from SEQ ID Nos. 706-717. In some embodiments, the fusion protein comprises an amino acid sequence having about 80%, about 81%, about 82%, about 83%, about 84%, about 85%, about 86%, about 87%, about 88%, about 89%, about 90%, about 91%, about 92%, about 93%, about 94%, about 95%, about 96%, about 97%, about 98%, about 99%, or about 100% identity to an amino acid sequence selected from SEQ ID Nos. 706-717, including all ranges and subranges therebetween. In some embodiments, the recombinant microbial cell comprises a polynucleotide encoding the fusion protein, wherein the polynucleotide comprises a nucleic acid sequence having at least about 80% identity to a nucleic acid sequence selected from SEQ ID Nos. 1494-1505. In some embodiments, the recombinant microbial cell comprises a polynucleotide comprising a nucleic acid sequence having about 80%, about 81%, about 82%, about 83%, about 84%, about 85%, about 86%, about 87%, about 88%, about 89%, about 90%, about 91%, about 92%, about 93%, about 94%, about 95%, about 96%, about 97%, about 98%, about 99%, or about 100% identity to a nucleic acid selected from SEQ ID Nos. 1494-1505, including all ranges and subranges therebetween.

### Additional Genetic Engineering Approaches

[0154] In some embodiments, the recombinant microbial cells disclosed herein express altered levels of one or more genes, which affect the production and/or levels of nepetalactol, nepetalactone, dihydronepetalactone, and/or one or more side products, such as geranic acid. In some embodiments, the alteration is an upregulation, while in other embodiments, the alteration is a downregulation. In some embodiments, the recombinant microbial cells are engineered to express the one or more genes from a heterologous promoter. The heterologous promoter may be have a different strength than the native promoter (that is, it may be stronger or weaker than the native promoter), and it may be inducible or constitutive. In some embodiments, the one or more genes may be native to the recombinant microbial cells, while in other embodiments, the one or more genes may be heterologous genes.

[0155] In some embodiments, the recombinant microbial cells of this disclosure comprise a deletion or disruption of the one or more genes which affect the production and/or levels of nepetalactol, nepetalactone, dihydronepetalactone, and/or one or more side products. In some embodiments, the recombinant microbial cells of this disclosure may be genetically engineered to downregulate one or more genes using any method known in the art for this purpose, such as replacement of their native promoter with a weaker promoter; insertion of a weaker promoter between the native promoter of the gene and the start codon of the gene; and/or mutagenesis of the coding and/or non-coding regions of the gene.

[0156] In some embodiments, the present disclosure teaches reducing the activities of genes which affect the production and/or levels of nepetalactol, nepetalactone, dihydronepetalactone, and/or one or more side products. In some embodiments the activities of these genes are reduced by (i) inhibition or reduction of the expression of the coding genes of the gene; (ii) partial or complete deletion of the coding genes the gene; (iii) expression of non-functional variants of the genes; and/or (iv) inhibition or reduction of the activity of the expressed genes.

[0157] In some embodiments, the recombinant microbial cells of this disclosure may be genetically engineered to upregulate one or more genes which affect the production and/or levels of nepetalactol, nepetalactone, dihydronepetalactone, and/or one or more side products using any method known in the art for this purpose, such as replacement of their native promoter with a stronger or constitutive promoter; insertion of a stronger promoter between the native promoter of the gene and the start codon of the gene; and/or mutagenesis of the coding and/or non-coding regions of the gene. In some embodiments, the recombinant microbial cells of this disclosure may be genetically engineered to comprise an expression cassette comprising the gene and a heterologous promoter.

[0158] In some embodiments, the one or more genes encode enzymes that contribute to side product formation that impairs the production of nepetalactol, nepetalactone and/or dihydronepetalactone (e.g., genes listed in Table 7). In some embodiments, the one or more genes are annotated as encoding oxidoreductases. In some embodiments, the one or more genes are predicted to encode a protein that contains an oxidoreductase motif/domain using a program known in the art for prediction of protein domains, such as, for example, Pfam and HMM.

[0159] In some embodiments, the one or more genes encodes an enzyme that either reduces at least one double bond present in any of the monoterpene intermediates, or reduces or oxidizes at least one alcohol, aldehyde or acid functional groups of any of the monoterpene intermediates, wherein the monoterpene intermediates are intermediates in an enzyme catalyzed pathway contributing to the synthesis of nepetalactol, nepetalactone and/or dihydronepetalactone.

[0160] In some embodiments, the one or more genes that are involved in side product formation are selected from the genes listed in Table 7.

TABLE 7
Target genes encoding potential oxidoreductases

| Gene ID | Gene Name | Gene ID | Gene Name | Gene ID | Gene Name |
|---|---|---|---|---|---|
| YHR179W | OYE2 | YML054C | CYB2 | YGL191W | COX13 |
| YPL171C | OYE3 | YML080W | DUS1 | YGL187C | COX4 |
| YMR083W | ADH3 | YLR401C | DUS3 | YNL052W | COX5A |
| YOR374W | ALD4 | YOR246C | ENV9 | YHR051W | COX6 |
| YAL061W | BDH2 | YIL005W | EPS1 | YMR256C | COX7 |
| YHR037W | PUT2 | YFL041W | FET5 | YLR395C | COX8 |
| YDL246C | SOR2 | YMR020W | FMS1 | YDL067C | COX9 |
| YMR169C | ALD3 | YLR214W | FRE1 | YDR019C | GCV1 |
| YER073W | ALD5 | YKL220C | FRE2 | YMR189W | GCV2 |
| YMR110C | HFD1 | YOR381W | FRE3 | YAL044C | GCV3 |
| YBR006W | UGA2 | YOL152W | FRE7 | YOR375C | GDH1 |
| YBR145W | ADH5 | YLR047C | FRE8 | YAL062W | GDH3 |
| YPL061W | ALD6 | YDL215C | GDH2 | YDL171C | GLT1 |
| YDL168W | SFA1 | YDR096W | GIS1 | YMR145C | NDE1 |
| YHR039C | MSC7 | YKL026C | GPX1 | YDL085W | NDE2 |
| YIL124W | AYR1 | YCL035C | GRX1 | YER178W | PDA1 |
| YNL202W | SPS19 | YPL059W | GRX5 | YPR191W | QCR2 |
| YMR170C | ALD2 | YER014W | HEM14 | YFR033C | QCR6 |
| YOR323C | PRO2 | YIR037W | HYR1 | YDR529C | QCR7 |
| YNL134C | | YER051W | JHD1 | YJL166W | QCR8 |
| YJR159W | SOR1 | YJR119C | JHD2 | YER070W | RNR1 |
| YMR303C | ADH2 | YIL125W | KGD1 | YDR178W | SDH4 |
| YOL086C | ADH1 | YIR034C | LYS1 | YGR209C | TRX2 |
| YCL030C | HIS4 | YNR050C | LYS9 | YBR166C | TYR1 |
| YBR046C | ZTA1 | YBR213W | MET8 | YMR318C | ADH6 |
| YBR026C | ETR1 | YBR084W | MIS1 | YAL060W | BDH1 |
| YML131W | | YKR080W | MTD1 | YLR070C | XYL2 |
| YBL069W | AST1 | YML120C | NDI1 | YOR125C | CAT5 |
| YMR152W | YIM1 | YBR035C | PDX3 | YLR056W | ERG3 |
| YCR102C | | YGL205W | POX1 | YGL012W | ERG4 |
| YLR460C | | YBL064C | PRX1 | YMR015C | ERG5 |
| YER101C | AST2 | YGR180C | RNR4 | YMR272C | SCS7 |
| YLL041C | SDH2 | YER169W | RPH1 | YOL059W | GPD2 |
| YOR356W | CIR2 | YBR037C | SCO1 | YOL151W | GRE2 |
| YER069W | ARG5, 6 | YLR164W | SHH4 | YOR136W | IDH2 |
| YDR158W | HOM2 | YJR104C | SOD1 | YKL085W | MDH1 |
| YJL052W | TDH1 | YHR008C | SOD2 | YDL022W | GPD1 |
| YJR009C | TDH2 | YCR083W | TRX3 | YML075C | HMG1 |
| YGR192C | TDH3 | YDR453C | TSA2 | YLR450W | HMG2 |
| YDL124W | | YKL216W | URA1 | YER081W | SER3 |
| YJR096W | | YFR049W | YMR31 | YDL174C | DLD1 |
| YOL165C | AAD15 | YKL069W | | YEL070W | DSF1 |
| YHR104W | GRE3 | YMR009W | ADI1 | YKR009C | FOX2 |
| YKL029C | MAE1 | YPR200C | ARR2 | YBR159W | IFA38 |
| YPL088W | | YJR025C | BNA1 | YKL055C | OAR1 |
| YJR155W | AAD10 | YJR078W | BNA2 | YHR063C | PAN5 |
| YNL331C | AAD14 | YBL098W | BNA4 | YMR226C | |
| YDL243C | AAD4 | YGR255C | COQ6 | YDR541C | |
| YBR149W | ARA1 | YER141W | COX15 | YGL157W | ARI1 |
| YMR041C | ARA2 | YGR088W | CTT1 | YIR036C | IRC24 |
| YIL155C | GUT2 | YHR055C | CUP1-2 | YNL241C | ZWF1 |
| YDR368W | YPR1 | YIL049W | DFG10 | YML056C | IMD4 |
| YGL256W | ADH4 | YDR402C | DIT2 | YDR127W | ARO1 |
| YOR120W | GCY1 | YDL178W | DLD2 | YHR183W | GND1 |
| YPR127W | | YEL071W | DLD3 | YGR256W | GND2 |
| YJL045W | | YIL010W | DOT5 | YJR139C | HOM6 |
| YML086C | ALO1 | YLR405W | DUS4 | YLR432W | IMD3 |
| YOR037W | CYC2 | YNL280C | ERG24 | YBR115C | LYS2 |
| YPL091W | GLR1 | YPR037C | ERV2 | YKL071W | |
| YPL023C | MET12 | YDR518W | EUG1 | YDR197W | CBS2 |
| YLR142W | PUT1 | YMR058W | FET3 | YLR109W | AHP1 |
| YKL148C | SDH1 | YHR176W | FMO1 | YGL160W | AIM14 |
| YMR315W | | YNR060W | FRE4 | YKR066C | CCP1 |
| YEL047C | FRD1 | YOR384W | FRE5 | YDR256C | CTA1 |
| YJR137C | MET5 | YLL051C | FRE6 | YHR053C | CUP1-1 |
| YJR051W | OSM1 | YCL026C-A | FRM2 | YNR015W | SMM1 |
| YHR179W | OYE2 | YBR244W | GPX2 | YKL086W | SRX1 |
| YPL171C | OYE3 | YDR513W | GRX2 | YDR297W | SUR2 |
| YHR106W | TRR2 | YDR098C | GRX3 | YER049W | TPA1 |
| YGR234W | YHB1 | YER174C | GRX4 | YLR043C | TRX1 |
| YKL150W | MCR1 | YDL010W | GRX6 | YML028W | TSA1 |
| YIL043C | CBR1 | YBR014C | GRX7 | YNL229C | URE2 |
| YFL018C | LPD1 | YLR364W | GRX8 | YIL111W | COX5B |
| YFR030W | MET10 | YIR038C | GTT1 | YPR167C | MET16 |
| YGL125W | MET13 | YCL026C-B | HBN1 | YHR001W-A | QCR10 |
| YBR221C | PDB1 | YER205C | HMX1 | YGR183C | QCR9 |
| YPL107W | | YLL057C | JLP1 | YGR204W | ADE3 |
| YML051W | GAL80 | YJR070C | LIA1 | YGL148W | ARO2 |
| YGL094C | PAN2 | YLR011W | LOT6 | YBL045C | COR1 |
| YLR084C | RAX2 | YOR288C | MPD1 | YLR038C | COX12 |
| YNL187W | SWT21 | YOL088C | MPD2 | YNL009W | IDP3 |
| YHR009C | TDA3 | YER042W | MXR1 | YIL094C | LYS12 |
| YML087C | AIM33 | YCL033C | MXR2 | YOL126C | MDH2 |
| YPL017C | IRC15 | YIL066C | RNR3 | YDL078C | MDH3 |
| YPR074C | TKL1 | YBR024W | SCO2 | YIL074C | SER33 |
| YHR079C | IRE1 | YNL037C | IDH1 | YGL185C | |
| YBR117C | TKL2 | YDL066W | IDP1 | YOR388C | FDH1 |
| YPL113C | | YLR174W | IDP2 | YNL274C | GOR1 |
| YGL039W | | | | | |

[0161] In some embodiments, the oxidoreductase is encoded by a gene selected from FMS1, SUR2, SWT1, QCR9, NCP1 and GDP1. In some embodiments, the recombinant microbial cells disclosed herein comprise a deletion of a gene encoding FMS1 oxidoreductase. In some embodiments, the recombinant microbial cells disclosed herein comprise a deletion of a gene encoding SUR2 oxidoreductase. In some embodiments, the recombinant microbial cells disclosed herein comprise a heterologous promoter operably linked to a gene encoding the oxidoreductase. In some embodiments, the heterologous promoter is a weaker promoter, as compared to the native promoter of the gene encoding the oxidoreductase. In some embodiments, the heterologous promoter is TDH3 or YEF3. In some embodiments, the recombinant microbial cells disclosed herein comprise TDH3 promoter operably linked to a gene encoding SWT1 oxidoreductase. In some embodiments, the recombinant microbial cells disclosed herein comprise YEF3 promoter operably linked to a gene encoding QCR9 oxidoreductase. In some embodiments, the recombinant microbial cells disclosed herein comprise an expression cassette comprising a gene encoding the oxidoreductase operatively linked to a promoter. In some embodiments, the recombinant microbial cells disclosed herein comprise an expression cassette comprising a gene encoding NCP1 oxidoreductase or GPD1 oxidoreductase operatively linked to GAL7 promoter.

[0162] In some embodiments, the recombinant microbial cells disclosed herein produce higher levels of nepetalactol, higher levels of nepetalactone, higher levels of dihydronepetolactone, and/or lower levels of geranic acid, as compared to a control recombinant cell, wherein the control recombinant cell has wild type levels of the oxidoreductase.

[0163] In some embodiments, the one or more genes comprises genes that encode enzymes catalyzing the transfer of at least one acetyl group to one or more alcohol ends of monoterpene intermediates that would result in unwanted side products, thus impairing the production of nepetalactol, nepetalactone and/or dihydronepetalactone. In some embodiments, the one or more genes is ATF1 (gene ID—YOR377W).

### Genetic Engineering of the DXP Pathway

[0164] In some embodiments, the recombinant microbial cells of this disclosure are engineered to upregulate one or more enzymes of the 1-deoxy-D-xylulose-5-phosphate pathway (DXP pathway) or the alcohol-dependent hemiterpene pathway. Without being bound by theory, it is thought that the overexpression of one or more enzymes of the DXP pathway may increase the flux through the DXP pathway to increase the amounts of IPP or DMAPP produced in the recombinant microbial cells of this disclosure, and thereby contribute to the increase in flux through the nepetalactol synthesis pathway, resulting in an increased amount of nepetalactol/nepetalactone/dihydronepetalactone in the recombinant microbial cells of this disclosure.

[0165] The DXP pathway is initiated with a thiamin diphosphate-dependent condensation between D-glyceraldehyde 3-phosphate and pyruvate to produce DXP, which is then reductively isomerized to 2-C-methyl-D-erythritol 4-phosphate (MEP) by DXP reducto-isomerase (DXR/IspC). Subsequent coupling between MEP and cytidine 5′-triphosphate (CTP) is catalyzed by CDP-ME synthetase (IspD) and produces methylerythritol cytidyl diphosphate (CDP-ME). An ATP-dependent enzyme (IspE) phosphorylates the C₂ hydroxyl group of CDP-ME, and the resulting 4-diphosphocytidyl-2-C-methyl-D-erythritol-2-phosphate (CDP-MEP) is cyclized by IspF to 2-C-methyl-D-erythritol-2,4-cyclodiphosphate (MEcPP). IspG catalyzes the ring-opening of the cyclic pyrophosphate and the C₃-reductive dehydration of MEcPP to 4-hydroxy-3-methyl-butenyl 1-diphosphate (HMBPP). The final step of the MEP pathway is catalyzed by IspH and converts HMBPP to both IPP and DMAPP (see FIG. 11).

[0166] In some embodiments, the recombinant microbial cells of this disclosure may comprise one or more polynucleotide(s) encoding one or more of the following enzymes of the DXP pathway: 1-Deoxy-D-xylulose 5-phosphate synthase (DXS), 1-Deoxy-D-xylulose 5-phosphate reductoisomerase (DXR), CDP-ME synthetase (IspD), IspE, IspF, and IspH. In some embodiments, the recombinant microbial cells of this disclosure may comprise one or more polynucleotide(s) encoding each of the following enzymes of the DXP pathway: 1-Deoxy-D-xylulose 5-phosphate synthase (DXS), 1-Deoxy-D-xylulose 5-phosphate reductoisomerase (DXR), CDP-ME synthetase (IspD), IspE, IspF, and IspH. Further details of the pathway are provided in Lund et al., ACS Synth. Biol. 2019, 8, 2, 232-238; and Zhao et al., Annu Rev Biochem. 2013; 82:497-530, the contents of each of which is incorporated herein by reference in their entireties for all purposes.

[0167] In some embodiments, the recombinant microbial cell is engineered to overexpress one or more of the enzymes of the following enzymes of the DXP pathway: 1-Deoxy-D-xylulose 5-phosphate synthase (DXS), 1-Deoxy-D-xylulose 5-phosphate reductoisomerase (DXR), CDP-ME synthetase (IspD), IspE, IspF, and IspH. In some embodiments, the recombinant microbial cell is engineered to overexpress all of the following enzymes of the DXP pathway: 1-Deoxy-D-xylulose 5-phosphate synthase (DXS), 1-Deoxy-D-xylulose 5-phosphate reductoisomerase (DXR), CDP-ME synthetase (IspD), IspE, IspF, and IspH. The amount of the enzyme expressed by the recombinant microbial cell may be higher than the amount of that corresponding enzyme in a wild type microbial cell by about 1.25 fold to about 20 fold, for example, about 1.5 fold, about 2 fold, about 2.5 fold, about 3 fold, about 3.5 fold, about 4 fold, about 4.5 fold, about 5 fold, about 5.5 fold, about 6 fold, about 6.5 fold, about 7 fold, about 8 fold, about 9 fold, about 10 fold, about 15 fold, about 20 fold, about 25 fold, about 30 fold, about 35 fold, about 40 fold, about 45 fold, about 50 fold, about 55 fold, about 60 fold, about 65 fold, about 70 fold, about 75 fold, about 75 fold, about 80 fold, about 85 fold, about 90 fold, about 95 fold, or about 100 fold, including all the subranges and values that lie therebetween.

[0168] In some embodiments the recombinant microbial cell has been modified to contain a heterologous promoter operably linked to one or more endogenous gene encoding an enzyme of the DXP pathway. In some embodiments, the heterologous promoter is a stronger promoter, as compared to the native promoter. In some embodiments, the recombinant microbial cell is engineered to express an enzyme of the DXP pathway constitutively. For instance, in some embodiments, the recombinant microbial cell may express an enzyme of the DXP pathway at a time when the enzyme is not expressed by the wild type microbial cell.

[0169] In other embodiments, the present disclosure envisions overexpressing one or more genes encoding one or more enzymes of the DXP pathway by increasing the copy number of said gene. Thus, in some embodiments, the recombinant microbial cell comprises at least one additional copy of a DNA sequence encoding an enzyme of the DXP pathway, as compared to a wild type microbial cell. In some embodiments, the recombinant microbial cell comprises 1 to 40 additional copies of a DNA sequence encoding an enzyme of the DXP pathway, as compared to a wild type microbial cell. For instance, the recombinant microbial cell may comprise 1, 2, 3, 4, 5, 6, 7, 8, 9, 10, 15, 20, 25, 30, 35, or 40 additional copies of the DNA sequence, compared to a wild type microbial cell, including all ranges and subranges therebetween.

[0170] In some embodiments, the present disclosure teaches methods of increasing nepetalactol biosynthesis by expressing one or more mutant genes encoding one or more enzymes of the DXP pathway. Thus, in some embodiments, the recombinant microbial cell comprises a DNA sequence encoding for one or more mutant DXP pathway enzymes. In some embodiments, the one or more mutant DXP pathway enzymes are more catalytically active than the corresponding wild type enzyme. In some embodiments, the one or more mutant DXP pathway enzymes have a higher k_{Cat}, as compared to the wild type enzyme. In some embodiments, the one or more mutant DXP pathway enzymes that are more catalytically active than the wild type enzyme, are insensitive to negative regulation, such as, for example, allosteric inhibition.

### Methods of Producing Nepetalactol, Nepetalactone and Dihydronepetalactone

[0171] The disclosure provides methods of producing nepetalactol, nepetalactone and/or dihydronepetalactone using any one of the recombinant microbial cells of this disclosure.

[0172] The disclosure provides methods of producing nepetalactol from a carbon source, comprising (a) providing any one of the recombinant microbial cells disclosed herein which is capable of producing nepetalactol from glucose; and (b) cultivating the recombinant microbial cell in a suitable cultivation medium comprising glucose or any comparable carbon source, thereby producing nepetalactol. In some embodiments, the carbon source is glucose, galactose, glycerol, and/or ethanol. In some embodiments, the carbon source is glucose.

[0173] The disclosure also provides methods producing nepetalactol comprising (a) providing any one of the recombinant microbial cells disclosed herein comprising one or more polynucleotides encoding a heterologous nepetalactol synthase (NEPS); and (b) cultivating the recombinant microbial cell in a suitable cultivation medium comprising a substrate feed. In some embodiments, the substrate feed is glucose or any comparable carbon source. In some embodiments, the substrate feed is any one or more of the substrates listed in Table 1 or Table 2, thereby producing nepetalactol.

[0174] The disclosure provides methods of producing a specific ratio of nepetalactol stereoisomers comprising (a) providing any one of the recombinant microbial cells disclosed herein comprising one or more polynucleotides encoding a heterologous nepetalactol synthase (NEPS); and (b) cultivating the recombinant microbial cell in a suitable cultivation medium comprising glucose or any comparable carbon source; or any one or more of the substrates listed in Table 1 or Table 2, thereby producing the specific ratio of nepetalactol stereoisomers. In some embodiments, the method produces cis, trans-nepetalactol in an amount that is more than 50% (for example, more that 55%, more than 60%, more than 65%, more than 70%, more than 75%, more than 80%, more that 85%, more than 90%, more than 95%, more than 99%, or an amount of 100%, including all values and subranges that lie therebetween) of the total amount of nepetalactol stereoisomers produced. In some embodiments, the method produces trans, cis-nepetalactol in an amount that is more than 50% (for example, more that 55%, more than 60%, more than 65%, more than 70%, more than 75%, more than 80%, more that 85%, more than 90%, more than 95%, more than 99%, or an amount of 100%, including all values and subranges that lie therebetween) of the total amount of nepetalactol stereoisomers produced. In some embodiments, the method produces trans, trans-nepetalactol in an amount that is more than 50% (for example, more that 55%, more than 60%, more than 65%, more than 70%, more than 75%, more than 80%, more that 85%, more than 90%, more than 95%, more than 99%, or an amount of 100%, including all values and subranges that lie therebetween) of the total amount of nepetalactol stereoisomers produced. In some embodiments, the method produces cis, cis-nepetalactol in an amount that is more than 50% (for example, more that 55%, more than 60%/c, more than 65%, more than 70%, more than 75%, more than 80%, more that 85%, more than 90%, more than 95%, more than 99%, or an amount of 100%, including all values and subranges that lie therebetween) of the total amount of nepetalactol stereoisomers produced.

[0175] The disclosure also provides methods producing nepetalactone comprising (a) providing any one of the recombinant microbial cells disclosed herein comprising one or more polynucleotides encoding a heterologous nepetalactone oxidoreductase (NOR) that catalyzes the reduction of nepetalactol to nepetalactone; (b) cultivating the recombinant microbial cell in a suitable cultivation medium; and (c) contacting the recombinant microbial cell with nepetalactol to form nepetalactone. In some embodiments, the recombinant microbial cell is cultivated in a suitable cultivation medium comprising nepetalactol. In some embodiments, the recombinant microbial cell is cultivated in a suitable cultivation medium comprising glucose or any comparable carbon source, such that nepetalactol is produced in the recombinant microbial cell. In some embodiments, the recombinant microbial cell is cultivated in a suitable cultivation medium comprising any one or more of the substrates listed in Table 1 or Table 2, such that nepetalactol is produced in the recombinant microbial cell.

[0176] The disclosure provides methods of producing a specific ratio of nepetalactone stereoisomers comprising (a) providing any one of the recombinant microbial cells disclosed herein comprising one or more polynucleotides encoding a heterologous nepetalactone oxidoreductase (NOR) that catalyzes the reduction of nepetalactol to nepetalactone; and (b) cultivating the recombinant microbial cell in a suitable cultivation medium comprising glucose or any comparable carbon source; or any one or more of the substrates listed in Table 1 or Table 2, thereby producing the specific ratio of nepetalactone stereoisomers. In some embodiments, the method produces cis, trans-nepetalactone in an amount that is more than 50% (for example, more that 55%, more than 60%, more than 65%, more than 70%, more than 75%, more than 80%, more that 85%, more than 90%, more than 95%, more than 99%, or an amount of 100%, including all values and subranges that lie therebetween) of the total amount of nepetalactone stereoisomers produced. In some embodiments, the method produces trans, cis-nepetalactone in an amount that is more than 50% (for example, more that 55%, more than 60%, more than 65%, more than 70%, more than 75%, more than 80%, more that 85%, more than 90%, more than 95%, more than 99%, or an amount of 100%, including all values and subranges that lie therebetween) of the total amount of nepetalactone stereoisomers produced. In some embodiments, the method produces trans, trans-nepetalactone in an amount that is more than 50% (for example, more that 55%, more than 60%, more than 65%, more than 70%, more than 75%, more than 80%, more that 85%, more than 90%, more than 95%, more than 99%, or an amount of 100%, including all values and subranges that lie therebetween) of the total amount of nepetalactone stereoisomers produced. In some embodiments, the method produces cis, cis-nepetalactone in an amount that is more than 50% (for example, more that 55%, more than 60%, more than 65%, more than 70%, more than 75%, more than 80%, more that 85%, more than 90%, more than 95%, more than 99%, or an amount of 100%, including all values and subranges that lie therebetween) of the total amount of nepetalactone stereoisomers produced.

[0177] The disclosure also provides methods producing dihydronepetalactone comprising (a) providing any one of the recombinant microbial cells disclosed herein comprising one or more polynucleotides encoding a heterologous dihydronepetalactone dehydrogenase (DND) that catalyzes the reduction of nepetalactone to dihydronepetalactone; (b) cultivating the recombinant microbial cell in a suitable cultivation medium; and (c) contacting the recombinant microbial cell with nepetalactone to form dihydronepetalactone. In some embodiments, the recombinant microbial cell is cultivated in a suitable cultivation medium comprising nepetalactone. In some embodiments, the recombinant microbial cell is cultivated in a suitable cultivation medium comprising glucose or any comparable carbon source, such that nepetalactone is produced in the recombinant microbial cell. In some embodiments, the recombinant microbial cell is cultivated in a suitable cultivation medium comprising any one or more of the substrates listed in Table 1 or Table 2, such that nepetalactone is produced in the recombinant microbial cell.

[0178] In some embodiments, the heterologous NEPS, NOR, or DND is derived from another microbial species, a plant cell or a mammalian cell. In some embodiments, the polynucleotide is derived from any one of the source organisms listed in the Sequence Listing, Table 3, Table 4, Table 5, or Table 6. In some embodiments, the polynucleotide is derived from Camptotheca acuminate, Catharanthus roseus, Rauvolfia serpentina, or Vinca minor.

[0179] In some embodiments, the polynucleotide encodes a protein derived from a plant of the genus Nepeta. In some embodiments, the polynucleotide is derived from a plant of any one of the following species: Nepeta mussinii, Nepeta cataria, Nepeta adenophyta, Nepeta agrestis, Nepeta alaghezi, Nepeta alatavica, Nepeta algeriensis, Nepeta amicorum, Nepeta amoena, Nepeta anamurensis, Nepeta annua, Nepeta apudeji, Nepeta argolica, Nepeta assadii, Nepeta assurgens, Nepeta astorensis, Nepeta atlantica, Nepeta autraniana, Nepeta azurea, Nepeta badachschanica, Nepeta bakhtiarica, Nepeta ballotifolia, Nepeta balouchestanica, Nepeta barfakensis, Nepeta baytopii, Nepeta bazoftica Jamza, Nepeta bellevii, Nepeta betonicifolia, Nepeta binaloudensis, Nepeta bodeana, Nepeta boissieri, Nepeta bokhonica, Nepeta bombaiensis, Nepeta bornmuelleri, Nepeta botschantzevii, Nepeta brachyantha, Nepeta bracteata, Nepeta brevifolia, Nepeta bucharica, Nepeta caerulea, Nepeta caesarea, Nepeta campestris, Nepeta camphorate, Nepeta campylantha, Nepeta cephalotes, Nepeta chionophila, Nepeta ciliaris, Nepeta cilicica, Nepeta clarkei, Nepeta coerulescens, Nepeta concolor, Nepeta conlerta, Nepeta congesta, Nepeta connate, Nepeta consanguinea, Nepeta crinite, Nepeta crispa, Nepeta curviflora, Nepeta cyunea, Nepeta cyrenaica, Nepeta czegemensis, Nepeta daenensis, Nepeta deflersiana, Nepeta densiflora, Nepeta dentate, Nepeta denudate, Nepeta dirmencii, Nepeta discolor, Nepeta distans, Nepeta duthiei, Nepeta elliptica, Nepeta elymaitica, Nepeta erecta, Nepeta eremokosmos, Nepeta eremophila, Nepeta eriosphaera, Nepeta eriostachya, Nepeta ernesti-mayeri, Nepeta everardii, Nepeta faassenii, Nepeta flavida, Nepeta floccose, Nepeta foliosa, Nepeta fordii, Nepeta formosa, Nepeta freitagii, Nepeta glechomifolia, Nepeta gloeocephala, Nepeta glomerata, Nepeta glomerulosa, Nepeta glutinosa, Nepeta gontscharovii, Nepeta govaniana, Nepeta gracililora, Nepeta granatensis, Nepeta grandiflora, Nepeta grata, Nepeta griffithii, Nepeta heliotropfiolia, Nepeta hemsleyana, Nepeta henanensis, Nepeta hindostana, Nepeta hispanica, Nepeta hormozganica, Nepeta humilis, Nepeta hymenodonta, Nepeta isaurica, Nepeta ispahanica, Nepeta italic, Nepeta jakupicensis, Nepeta jomdaensis, Nepeta juncea, Nepeta knorringiana, Nepeta koeieana, Nepeta kokamirica, Nepeta kokanica, Nepeta komarovii, Nepeta kotschvi, Nepeta kurdica, Nepeta kurramensis, Nepeta ladanolens, Nepeta laevigata, Nepeta lagopsis, Nepeta lamiifolia, Nepeta lamiopsis, Nepeta lasiocephala, Nepeta latifolia, Nepeta leucolaena, Nepeta linearis, Nepeta lipskyi, Nepeta longibracteata, Nepeta longijlora, Nepeta longituba, Nepeta ludlow-hewittii, Nepeta macrosiphon, Nepeta mahanensis, Nepeta manchuriensis, Nepeta mariae, Nepeta maussarifi, Nepeta melissifolia, Nepeta membranmfolia, Nepeta menthoides Nepeta meyeri, Nepeta micrantha, Nepeta minuticephala, Nepeta mirzayanii, Nepeta mollis, Nepeta monocephala, Nepeta monticola, Nepeta multibracteata, Nepeta multicaulis, Nepeta multifidi, Nepeta natanzensis, Nepeta nawarica, Nepeta nepalensis, Nepeta nepetella, Nepeta nepetellae, Nepeta nepetoides, Nepeta nervosa, Nepeta nuda, Nepeta obtusicrena, Nepeta odorifera, Nepeta olgae, Nepeta orphanidea, Nepeta pabotii, Nepeta paktiana, Nepeta pamirensis, Nepeta parnassica, Nepeta paucifolia, Nepeta persica, Nepeta petraea, Nepeta phyllochlamys, Nepeta pilinux, Nepeta podlechin, Nepeta podostachys, Nepeta pogonosperma, Nepeta polyodonta, Nepeta praetervisa, Nepeta prattii, Nepeta prostrata, Nepeta pseudokokanica, Nepeta pubescens, Nepeta pungens, Nepeta racemose, Nepeta raphanorhiza, Nepeta rechingern, Nepeta rivularis, Nepeta roopiana, Nepeta rtanjensis, Nepeta rubella, Nepeta rugose, Nepeta saccharata, Nepeta santoana, Nepeta saturejoides, Nepeta schiraziana, Nepeta schmidi, Nepeta schugnanica, Nepeta scordotis, Nepeta septemcrenata, Nepeta sessilis, Nepeta shahmirzadensis, Nepeta sheilae, Nepeta sibirica, Nepeta sorgerae, Nepeta sosnovskyi, Nepeta souliei, Nepeta spathuhfera, Nepeta sphaciotica, Nepeta spruneri, Nepeta stachyoides, Nepeta staintonii, Nepeta stenantha, Nepeta stewartiana, Nepeta straussii, Nepeta stricta, Nepeta suavis, Nepeta subcaespitosa, Nepeta subhastata, Nepeta subincisa, Nepeta subintegra, Nepeta subsessilis, Nepeta sudanica, Nepeta sulfiriflora, Nepeta sulphurea, Nepeta sungpanensis, Nepeta supine, Nepeta taxkorganica, Nepeta tenuiflora, Nepeta tenuifolia, Nepeta teucriifolia, Nepeta teydea, Nepeta tibestica, Nepeta tmolea, Nepeta trachonitica, Nepeta transiliensis, Nepeta trautvetteri, Nepeta trichocalyx, Nepeta tuberosa, Nepeta tytthantha, Nepeta uberrima, Nepeta ucranica, Nepeta veitchii, Nepeta velutina, Nepeta tiscida, Nepeta viviani, Nepeta wettsteinii, Nepeta wilsonii, Nepeta woodiana, Nepeta yanthina, Nepeta yesoensis, Nepeta zandaensis, or Nepeta zangezura.

[0180] In some embodiments of the methods and recombinant microbial cells disclosed herein, the one or more polynucleotides are codon optimized for expression in the recombinant microbial host cell. In some embodiments, the polynucleotides disclosed herein are inserted into a suitable region of the recombinant microbial cell genome; or into a centromeric or episomal plasmid under any promoter that is known and commonly used in the art.

[0181] The disclosure also provides methods of producing nepetalactol, nepetalactone or dihydronepetalactone ex vivo or in vitro, comprising bringing a substrate in contact with one or more enzymes and cofactors required for the enzymatic conversion of the substrate to nepetalactol, nepetalactone or dihydronepetalactone, thereby forming nepetalactol, nepetalactone or dihydronepetalactone. In some embodiments, the substrate is glucose or a comparable carbon source, such as galactose, glycerol and ethanol. In some embodiments, the substrate may be selected from those listed in Table 1 or Table 2, such as, for example 8-hydroxygeraniol. In some embodiments, the one or more enzymes are expressed ex vivo or in vitro (through cell-free expression). In some embodiments, the one or more enzymes are expressed in recombinant microbial cells of this disclosure, followed by the isolation and purification of the enzymes through cell lysis and protein purification steps for use in the ex vivo or in vitro production of nepetalactol, nepetalactone or dihydronepetalactone.

[0182] (a) Host Cells: As used herein, the term “microbial cell” includes, but is not limited to, the two prokaryotic domains, Bacteria and Archaea, as well as eukaryotic fungi and protists. However, in certain aspects, “higher” eukaryotic organisms such as insects, plants, and animals may be utilized in the methods taught herein.

[0183] Suitable host cells include, but are not limited to: bacterial cells, algal cells, plant cells, fungal cells, insect cells, and mammalian cells. In one illustrative embodiment, suitable host cells include E. coli (e.g., SHuffle® competent E. coli available from New England BioLabs in Ipswich, Mass.).

[0184] Other suitable host organisms of the present disclosure include microorganisms of the genus Corynebacterium. In some embodiments, Corynebacterium strains/species include: C. efficiens, with the deposited type strain being DSM44549, C. glutamicum, with the deposited type strain being ATCC13032, and C. ammoniagenes, with the deposited type strain being ATCC6871. In some embodiments, the host cell of the present disclosure is C. glutamicum.

[0185] Suitable host strains of the genus Corynebacterium, in particular of the species Corynebacterium glutamicum, are in particular the known wild-type strains: Corynebacterium glutamicum ATCC13032, Corynebacterium acetoglutamicum ATCC15806, Corynebacterium acetoacidophilum ATCC13870, Corynebacterium melassecola ATCC17965, Corynebacterium thermoaminogenes FERM BP-1539, Brevibacterium flavum ATCC14067, Brevibacterium lactofermentum ATCC13869, and Brevibacterium divaricatum ATCC14020; and L-amino acid-producing mutants, or strains, prepared therefrom, such as, for example, the L-lysine-producing strains: Corynebacterium glutamicum FERM-P 1709, Brevibacteriur flavum FERM-P 1708, Brevibacterium lactofermentum FERM-P 1712, Corynebacterium glutamicum FERM-P 6463, Corynebacterium glutamicum FERM-P 6464, Corynebacterium glutamicum DM58-1, Corynebacterium glutamicum DG52-5, Corynebacterium glutamicum DSM5714, and Corynebacterium glutamicum DSM12866.

[0186] The term “Micrococcus glutamicus” has also been in use for C. glutamicum. Some representatives of the species C. efficiens have also been referred to as C. thermoaminogenes in the prior art, such as the strain FERM BP-1539, for example.

[0187] In some embodiments, the host cell of the present disclosure is a eukaryotic cell. Suitable eukaryotic host cells include, but are not limited to: fungal cells, algal cells, insect cells, animal cells, and plant cells. Suitable fungal host cells include, but are not limited to: Ascorycota, Basidiomycota, Deuteromycota, Zygomycota, Fungi imperfecti. The fungal host cells include yeast cells and filamentous fungal cells. Suitable filamentous fungi host cells include, for example, any filamentous forms of the subdivision Eumycotina and Oomycota. (see, e.g., Hawksworth et al., In Ainsworth and Bisby's Dictionary of The Fungi, 8^{th} edition, 1995, CAB International, University Press, Cambridge, UK, which is incorporated herein by reference). Filamentous fungi are characterized by a vegetative mycelium with a cell wall composed of chitin, cellulose and other complex polysaccharides. The filamentous fungi host cells are morphologically distinct from yeast.

[0188] In certain illustrative, but non-limiting embodiments, the filamentous fungal host cell may be a cell of a species of: Achlya, Acremonium, Aspergillus, Aureobasidium, Bjerkandera, Ceriporiopsis, Cephalosporium, Chrysosporium, Cochliobolus, Corynascus, Cryphonectria, Cryptococcus, Coprinus, Coriolus, Diplodia, Endothis, Gibberella, Gliocladium, Humicola, Hypocrea, Myceliophthora (e.g., Myceliophthora thermophila), Mucor, Neurospora, Penicillium, Podospora, Phlebia, Piromyces, Pyricularia, Rhizomucor, Rhizopus, Schizophyllum, Scytalidium, Sporotrichum, Talaromyces, Thermoascus, Thielavia, Tramates, Tolypocladium, Trichoderma, Verticillium, Volvariella, or teleomorphs, or anamorphs, and synonyms or taxonomic equivalents thereof. In one embodiment, the filamentous fungus is selected from the group consisting of A. nidulans, A. oryzae, A. sojae, and Aspergilli of the A. niger Group. In an embodiment, the filamentous fungus is Aspergillus niger.

[0189] In some embodiments, the host cells may comprise specific mutants of a fungal species. Examples of such mutants can be strains that protoplast very well; strains that produce mainly or, more preferably, only protoplasts with a single nucleus; strains that regenerate efficiently in microtiter plates, strains that regenerate faster and/or strains that take up polynucleotide (e.g., DNA) molecules efficiently, strains that produce cultures of low viscosity such as, for example, cells that produce hyphae in culture that are not so entangled as to prevent isolation of single clones and/or raise the viscosity of the culture, strains that have reduced random integration (e.g., disabled non-homologous end joining pathway) or combinations thereof.

[0190] In some embodiments, the host cell comprises a specific mutant strain, which lacks a selectable marker gene such as, for example, uridine-requiring mutant strains. These mutant strains can be either deficient in orotidine 5 phosphate decarboxylase (OMPD) or orotate p-ribosyl transferase (OPRT) encoded by the pyrG or pyrE gene, respectively (T. Goosen et al., Curr Genet. 1987, 11:499 503; J. Begueret et al., Gene. 1984 32:487 92.

[0191] In some embodiments, the host cell comprises specific mutant strains that possess a compact cellular morphology characterized by shorter hyphae and a more yeast-like appearance.

[0192] Suitable yeast host cells include, but are not limited to: Candida, Hansenula, Saccharomyces, Schizosaccharomyces, Pichia, Kluyveromyces, and Yarrowia. In some embodiments, the yeast cell is Hansenula polymorpha, Saccharomyces cerevisiae, Saccaromyces carlsbergensis, Saccharomyces diastaticus, Saccharomyces norbensis, Saccharomyces kluyveri, Schizosaccharomyces pombe, Pichia pastoris, Pichia finlandica, Pichia trehalophila, Pichia kodamae, Pichia membranaefaciens, Pichia opuntiae, Pichia thermotolerans, Pichia salictaria, Pichia quercuum, Pichia pijperi, Pichia stipitis, Pichia methanolica, Pichia angusta, Kluyveromyces lactis, Candida albicans, or Yarrowia lipolytica.

[0193] In certain embodiments, the host cell is an algal cell such as, Chlamydomonas (e.g., C. reinhardrii) and Phormidium (P. sp. ATCC29409).

[0194] In other embodiments, the host cell is a prokaryotic cell. Suitable prokaryotic cells include gram positive, gram negative, and gram-variable bacterial cells. The host cell may be a species of, but not limited to: Agrobacterium, Alicyclobacillus, Anabaena, Anacystis, Acinetobacter, Acidothermus, Arthrobacter, Azobacter, Bacillus, Biiidobacterium, Brevibacterium, Butyrivibrio, Buchnera, Campestris, Camplyobacter, Clostridium, Corynebacterium, Chromatium, Coprococcus, Escherichia, Enterococcus, Enterobacter, Erwinia, Fusobacterium, Faecalibacterium, Francisella, Flavobacterium, Geobacillus, Haemophilus, Helicobacter, Klebsiella, Lactobacillus, Lactococcus, Ilyobacter, Micrococcus, Microbacterium, Mesorhizobium, Methylobacterium, Methylobacterium, Mycobacterium, Neisseria, Pantoea, Pseudomonas, Prochlorococcus, Rhodobacter, Rhodopseudomonas, Rhodopseudomonas, Roseburia, Rhodospirillum, Rhodococcus, Scenedesmus, Streptomyces, Streptococcus, Synecoccus, Saccharomonospora, Staphylococcus, Serratia, Salmonella, Shigella, Thermoanaerobacterium, Tropheryma, Tularensis, Temecula, Thermosynechococcus, Thermococcus, Ureaplasma, Xanthomonas, Xylella, Yersinia, and Zymomonas. In some embodiments, the host cell is Corynebacterium glutamicum.

[0195] In some embodiments, the bacterial host strain is an industrial strain. Numerous bacterial industrial strains are known and suitable in the methods and compositions described herein.

[0196] In some embodiments, the bacterial host cell is of the Agrobacterium species (e.g., A. radiobacter, A. rhizogenes, A. rubi), the Arthrobacter species (e.g., A. aurescens, A. citreus, A. globformis, A. hydrocarboglutamicus, A. mysorens, A. nicotianae, A. paraffineus, A. protophonniae, A. roseoparaffinus, A. sulfureus, A. ureafaciens), the Bacillus species (e.g., B. thuringiensis, B. anthracis, B. megaterium, B. subtilis, B. lentus, B. circulars, B. pumilus, B. lautus, B. coagulans, B. brevis, B. firmus, B. alkaophius, B. licheniformis, B. clausii, B. stearothermophilus, B. halodurans and B. amyloliquefaciens. In particular embodiments, the host cell will be an industrial Bacillus strain including but not limited to B. subtilis, B. pumilus, B. licheniformis, B. megaterium, B. clausii, B. stearothermophilus and B. amyloliquefaciens. In some embodiments, the host cell will be an industrial Clostridium species (e.g., C. acetobutylicum, C. tetani E88, C. lituseburense, C. saccharobutylicum, C. perfringens, C. beijerinckii). In some embodiments, the host cell will be an industrial Corynebacterium species (e.g., C. glutamicum, C. acetoacidophilum). In some embodiments, the host cell will be an industrial Escherichia species (e.g., E. coli). In some embodiments, the host cell will be an industrial Erwinia species (e.g., E. uredovora, E. carotovora, E. ananas, E. herbicola, E. punctata, E. terreus). In some embodiments, the host cell will be an industrial Pantoea species (e.g., P. citrea, P. agglomerans). In some embodiments, the host cell will be an industrial Pseudomonas species, (e.g., P. putida, P. aeruginosa, P. mevalonii). In some embodiments, the host cell will be an industrial Streptococcus species (e.g., S. equisimiles, S. pyogenes, S. uberis). In some embodiments, the host cell will be an industrial Streptomyces species (e.g., S. ambofaciens, S. achromogenes, S. avermitilis, S. coelicolor, S. aureofaciens, S. aureus, S. fungicidicus, S. griseus, S. lividans). In some embodiments, the host cell will be an industrial Zymomonas species (e.g., Z. mobilis, Z. lipolytica), and the like.

[0197] In some embodiments, the host cell may be any animal cell type, including mammalian cells, for example, human (including 293, WI38, PER.C6 and Bowes melanoma cells), mouse (including 3T3, NS0, NS1, Sp2/0), hamster (CHO, BHK), monkey (COS, FRhL, Vero), and hybridoma cell lines.

[0198] In various embodiments, strains that may be used in the practice of the disclosure including both prokaryotic and eukaryotic strains, are readily accessible to the public from a number of culture collections such as American Type Culture Collection (ATCC), Deutsche Sammlung von Mikroorganismen and Zellkulturen GmbH (DSM), Centraalbureau Voor Schimmelcultures (CBS), and Agricultural Research Service Patent Culture Collection, Northern Regional Research Center (NRRL).

[0199] In some embodiments, the methods of the present disclosure are also applicable to multi-cellular organisms. The organisms can comprise a plurality of plants such as Grarineae, Fetucoideae, Poacoideae, Agrostis, Phleum, Dactylis, Sorgum, Setaria, Zea, Oryza, Triticum, Secale, Avena, Hordeum, Saccharum, Poa, Festuca, Stenotaphrum, Cynodon, Coix, Olyreae, Phareae, Compositae, Nicotiana, or Leguminosae. For example, the plants can be corn, rice, soybean, cotton, wheat, rye, oats, barley, pea, beans, lentil, peanut, yam bean, cowpeas, velvet beans, clover, alfalfa, lupine, vetch, lotus, sweet clover, wisteria, sweet pea, sorghum, millet, sunflower, canola or the like. Similarly, the organisms can include a plurality of animals such as non-human mammals, fish, insects, or the like.

[0200] (b) Genetic engineering methods: The host cells described herein may comprise one or more vectors comprising one or more nucleic acid sequences encoding the enzymes disclosed herein. Vectors useful in the methods described herein can be linear or circular. Vectors may integrate into a target genome of a host cell or replicate independently in a host cell. Vectors may include, for example, an origin of replication, a multiple cloning site (MCS), and/or a selectable marker. An expression vector typically includes an expression cassette containing regulatory elements, such as a promoter, a ribosome binding sequence (RBS) and/or a downstream terminator sequence that facilitate expression of a polynucleotide sequence (often a coding sequence) in a particular host cell. Non-limiting examples of regulatory elements include promoters, enhancers, internal ribosomal entry sites (IRES), and other expression control elements (e.g., transcription termination signals, such as polyadenylation signals and poly-U sequences). Such regulatory elements are described, for example, in Goeddel, Gene Expression Technology: Methods In Enzymology 185, Academic Press, San Diego, Calif. (1990), the contents of which are incorporated herein by reference in its entirety for all purposes.

[0201] The host cells of this disclosure may be prepared using conventional techniques of molecular biology (including recombinant techniques), microbiology, cell biology, and biochemistry, which are within the skill of the art. Such techniques are explained fully in the literature, see e.g., “Molecular Cloning: A Laboratory Manual,” fourth edition (Sambrook et al., 2012); “Oligonucleotide Synthesis” (M. J. Gait, ed., 1984); “Culture of Animal Cells: A Manual of Basic Technique and Specialized Applications” (R. I. Freshney, ed., 6th Edition, 2010); “Methods in Enzymology” (Academic Press, Inc.); “Current Protocols in Molecular Biology” (F. M. Ausubel et al., eds., 1987, and periodic updates); “PCR The Polymerase Chain Reaction,” (Mullis et al., eds., 1994); Singleton et al., Dictionary of Microbiology and Molecular Biology 2nd ed., J. Wiley & Sons (New York, N.Y. 1994), the contents of each of which are incorporated herein by reference in their entireties for all purposes.

[0202] Vectors or other polynucleotides may be introduced into host cells by any of a variety of standard methods, such as transformation, conjugation, electroporation, nuclear microinjection, transduction, transfection (e.g., lipofection mediated or DEAEDextrin mediated transfection or transfection using a recombinant phage virus), incubation with calcium phosphate DNA precipitate, high velocity bombardment with DNA-coated microprojectiles, and protoplast fusion. Transformants can be selected by any method known in the art. Suitable methods for selecting transformants are described in U.S. Patent Pub. Nos. 2009/0203102, 2010/0048964, and 2010/0003716, and International Publication Nos. WO 2009/076676, WO 2010/003007, and WO 2009/132220, the contents of each of which are incorporated herein by reference in their entireties for all purposes.

[0203] In some embodiments, the method of introducing one or more vectors into the host cell comprises methods of looping out selected regions of DNA from the host organisms. The looping out method can be as described in Nakashima et al 2014 “Bacterial Cellular Engineering by Genome Editing and Gene Silencing.” Int. J. Mol. Sci. 15(2), 2773-2793. In some embodiments, the present disclosure teaches looping out selection markers from positive transformants. Looping out deletion techniques are known in the art, and are described in (Tear et al. 2014 “Excision of Unstable Artificial Gene-Specific inverted Repeats Mediates Scar-Free Gene Deletions in Escherichia coli.” Appl. Biochem. Biotech. 175: 1858-1867). The looping out methods can be performed using single-crossover homologous recombination or double-crossover homologous recombination. In one embodiment, looping out of selected regions as described herein can entail using single-crossover homologous recombination as described herein.

[0204] First, loop out vectors are inserted into selected target regions within the genome of the host organism (e.g., via homologous recombination, CRISPR, or other gene editing technique). In one embodiment, single-crossover homologous recombination is used between a circular plasmid or vector and the host cell genome in order to loop-in the circular plasmid or vector. The inserted vector can be designed with a sequence which is a direct repeat of an existing or introduced nearby host sequence, such that the direct repeats flank the region of DNA slated for looping and deletion. Once inserted, cells containing the loop out plasmid or vector can be counter selected for deletion of the selection region (e.g., lack of resistance to the selection gene).

[0205] Persons having skill in the art will recognize that the description of the loopout procedure represents but one illustrative method for deleting unwanted regions from a genome. Indeed the methods of the present disclosure are compatible with any method for genome deletions, including but not limited to gene editing via CRISPR, TALENS, FOK, or other endonucleases. Persons skilled in the art will also recognize the ability to replace unwanted regions of the genome via homologous recombination techniques.

[0206] In some embodiments, the host cell cultures are grown to an optical density at 600 nm of 1-500, such as an optical density of 50-150. Microbial (as well as other) cells can be cultured in any suitable medium including, but not limited to, a minimal medium, i.e., one containing the minimum nutrients possible for cell growth. Minimal medium typically contains: (1) a carbon source for microbial growth; (2) salts, which may depend on the particular microbial cell and growing conditions; and (3) water. Suitable media can also include any combination of the following: a nitrogen source for growth, a sulfur source for growth, a phosphate source for growth, metal salts for growth, vitamins for growth, and other cofactors for growth.

[0207] Any suitable carbon source can be used to cultivate the host cells. The term “carbon source” refers to one or more carbon-containing compounds capable of being metabolized by a microbial cell. In various embodiments, the carbon source is a carbohydrate (such as a monosaccharide, a disaccharide, an oligosaccharide, or a polysaccharide), or an invert sugar (e.g., enzymatically treated sucrose syrup). Illustrative monosaccharides include glucose (dextrose), fructose (levulose), and galactose; illustrative oligosaccharides include dextran or glucan, and illustrative polysaccharides include starch and cellulose. Suitable sugars include C6 sugars (e.g., fructose, mannose, galactose, or glucose) and C5 sugars (e.g., xylose or arabinose). Other, less expensive carbon sources include sugar cane juice, beet juice, sorghum juice, and the like, any of which may, but need not be, fully or partially deionized.

[0208] The salts in a culture medium generally provide essential elements, such as magnesium, nitrogen, phosphorus, and sulfur to allow the cells to synthesize proteins and nucleic acids. Minimal medium can be supplemented with one or more selective agents, such as antibiotics.

[0209] To produce nepetalactol, nepetalactone, and/or dihydronepetalactone, the culture medium can include, and/or is supplemented during culture with, glucose and/or a nitrogen source such as urea, an ammonium salt, ammonia, or any combination thereof. In some embodiments, the culture medium includes and/or is supplemented to include any carbon source of the nepetalactone biosynthetic pathway, for example, as shown in FIG. 1. In some embodiments, the culture medium includes and/or is supplemented to include geraniol and/or 8-hydroxygeraniol. In some embodiments, the culture medium includes and/or is supplemented to include any carbon source of the nepetalactone biosynthetic pathway in the range of about 0.1-100 g/L.

[0210] Materials and methods suitable for the maintenance and growth of microbial (and other) cells are well known in the art. See, for example, U.S. Pub. Nos. 2009/0203102, 2010/0003716, and 2010/0048964, and International Pub. Nos. WO 2004/033646, WO 2009/076676, WO 2009/132220, and WO 2010/003007, Manual of Methods for General Bacteriology Gerhardt et al., eds), American Society for Microbiology, Washington, D.C. (1994) or Brock in Biotechnology: A Textbook of Industrial Microbiology, Second Edition (1989) Sinauer Associates, Inc., Sunderland, Mass. In general, cells are grown and maintained at an appropriate temperature, gas mixture, and pH (such as about 20° C. to about 37° C., about 0% to about 84% CO2, and a pH between about 3 to about 9). In some aspects, cells are grown at 35° C. In certain embodiments, such as where thermophilic bacteria are used as the host cells, higher temperatures (e.g., 50° C.-75° C.) may be used. In some aspects, the pH ranges for fermentation are between about pH 5.0 to about pH 9.0 (such as about pH 6.0 to about pH 8.0 or about 6.5 to about 7.0). Cells can be grown under aerobic, anoxic, or anaerobic conditions based on the requirements of the particular cell.

[0211] Standard culture conditions and modes of fermentation, such as batch, fedbatch, or continuous fermentation that can be used are described in U.S. Publ. Nos. 2009/0203102, 2010/0003716, and 2010/0048964, and International Pub. Nos. WO 2009/076676, WO 2009/132220, and WO 2010/003007. Batch and Fed-Batch fermentations are common and well known in the art, and examples can be found in Brock, Biotechnology: A Textbook of Industrial Microbiology, Second Edition (1989) Sinauer Associates, Inc.

[0212] In some embodiments, the cells are cultured under limited sugar (e.g., glucose) conditions. In various embodiments, the amount of sugar that is added is less than or about 105% (such as about 100%, 90%, 80%, 70%, 60%, 50%, 40%, 30%, 20%, or 10%) of the amount of sugar that can be consumed by the cells. In particular embodiments, the amount of sugar that is added to the culture medium is approximately the same as the amount of sugar that is consumed by the cells during a specific period of time. In some embodiments, the rate of cell growth is controlled by limiting the amount of added sugar such that the cells grow at a rate that can be supported by the amount of sugar in the cell medium. In some embodiments, sugar does not accumulate during the time the cells are cultured. In various embodiments, the cells are cultured under limited sugar conditions for times greater than or about 1, 2, 3, 5, 10, 15, 20, 25, 30, 35, 40, 50, 60, or 70 hours or even up to about 5-10 days. In various embodiments, the cells are cultured under limited sugar conditions for greater than or about 5, 10, 15, 20, 25, 30, 35, 40, 50, 60, 70, 80, 90, 95, or 100% of the total length of time the cells are cultured. While not intending to be bound by any particular theory, it is believed that limited sugar conditions can allow more favorable regulation of the cells.

[0213] In some aspects, the cells are grown in batch culture. The cells can also be grown in fed-batch culture or in continuous culture. Additionally, the cells can be cultured in minimal medium, including, but not limited to, any of the minimal media described above. The minimal medium can be further supplemented with 1.0% (w/v) glucose (or any other six-carbon sugar) or less. Specifically, the minimal medium can be supplemented with 1% (w/v), 0.9% (w/v), 0.8% (w/v), 0.7% (w/v), 0.60% (w/v), 0.5% (w/v), 0.4% (w/v), 0.3% (w/v), 0.2% (w/v), or 0.1% (w/v) glucose. In some cultures, significantly higher levels of sugar (e.g., glucose) are used, e.g., at least 10% (w/v), 20% (w/v), 30% (w/v), 40% (w/V), 50% (w/v), 60% (w/v), 70% (w/v), or up to the solubility limit for the sugar in the medium, including any ranges and subranges therebetween. In some embodiments, the sugar levels fall within a range of any two of the above values, e.g.: 0.1-10% (w/v), 1.0-20% (w/v), 10-70% (w/v), 20-60% (w/v), or 30-50% (w/v). Furthermore, different sugar levels can be used for different phases of culturing. For fed-batch culture (e.g., of E. coli, S. cerevisiae or C. glutamicum), the sugar level can be about 10-200 g/L (1-20% (w/v)) in the batch phase and then up to about 500-700 g/L (50-70% in the feed).

[0214] Additionally, the minimal medium can be supplemented with 0.1% (w/v) or less yeast extract. Specifically, the minimal medium can be supplemented with 0.1% (w/v), 0.09% (w/v), 0.08% (w/v), 0.07% (w/v), 0.06% (w/v), 0.05% (w/v), 0.04% (w/v), 0.03% (w/v), 0.02% (w/v), or 0.01% (w/v) yeast extract, including any ranges and subranges therebetween. Alternatively, the minimal medium can be supplemented with 1% (w/v), 0.9% (w/v), 0.8% (w/v), 0.7% (w/v), 0.6% (w/v), 0.5% (w/v), 0.4% (w/v), 0.3% (w/v), 0.2% (w/v), or 0.1% (w/v) glucose and with 0.1% (w/v), 0.09% (w/v), 0.08% (w/v), 0.07% (w/v), 0.06% (w/v), 0.05% (w/v), 0.04% (w/v), 0.03% (w/v), or 0.02% (w/v) yeast extract, including any ranges and subranges therebetween. In some cultures, significantly higher levels of yeast extract can be used, e.g., at least 1.5% (w/v), 2.0% (w/v), 2.5% (w/v), or 3% (w/v). In some cultures (e.g., of E. coli, S. cerevisiae or C. glutamicum), the yeast extract level falls within a range of any two of the above values, e.g.: 0.5-3.0% (w/v), 1.0-2.5% (w/v), or 1.5-2.0% (w/v).

[0215] Illustrative materials and methods suitable for the maintenance and growth of host cells are further described in Examples 1 and 2.

### Two-Phased Fermentation Process

[0216] In some embodiments, the disclosure provides a bi-phasic fermentation process capable of generating sufficient cell biomass and maintaining key factors for production. The bi-phasic fed-batch fermentation process disclosed herein allows for optimization of growth and production of the product of interest and an in-situ product extraction. The advantages of using such a fermentation process is that the product is continuously extracted from the aqueous phase and into the organic phase during the course of fermentation. The typical fermentation process consists of a seed train and a fed batch main fermentation.

[0217] In some embodiments, the seed train starts with a glycerol stock banked in media suitable for the strain as per standard methods. In some embodiments, the seed train process has a two-step shake flask seed train that allows for growing the cell-line to high enough densities, and also creates an environment (e.g. media and pH) similar to the fermentation process. In some embodiments, a fermentation seed tank can be used to further increase the amount of biomass prior to inoculation in the main fermentation vessel and further synchronize the cells prior to inoculation in the main tank. In some embodiments, the seed tank matches similar parameters to the batch phase of the main fermentation and is typically run without a feeding strategy in place, however this can be adjusted depending on the scale of the process. In some embodiments, media components can be altered depending on process conditions.

[0218] In some embodiments, the main fermentation process consists of a batch phase followed by a fed batch portion. The batch phase of the fermentation contains nutrients needed to harbor growth of the microorganism and where needed, a chemical repressor, pending expression control as illustrated in Example 12. In some embodiments, an organic solvent is added to the batch portion of the fermentation. In some embodiments the organic solvent can be fed in at a later stage. In some embodiments, the organic solvent is added upon induction of the microbial strain to produce the product. In some embodiments the organic solvent is added before the induction of the microbial strain to produce the product.

[0219] In some embodiments, the main fermentation process is temperature regulated (e.g. 30° C.), pH controlled typically one sided but could be two sided (e.g. pH 5.0 set point controlled with ammonium hydroxide or similar), and dissolved oxygen maintained at a predetermined setpoint (e.g. DO: 30% or similar). In some embodiments, the present disclosure teaches that during the course of the batch phase of fermentation a typical DO trend is observed after which a DO and pH signal are used to trigger the addition of an inducer (when required) and then the feeding regime. In some embodiments, fermentation tanks are aerated by sparging air. In some embodiments, the fermentation tanks comprise cascade control on agitation to maintain DO set point. In some embodiments, the fermentation tanks are supplemented with oxygen when necessary.

[0220] In some embodiments, the present disclosure teaches that during the fed-batch portion of fermentation carbon substrate (e.g. glucose) and media are fed into the fermentation vessel. In some embodiments, the media contains inducer and/or lacking repressor as illustrated in Example 12 (depending on the expression system used). Thus, in some embodiments, the present disclosure teaches a feeding profile that is fixed feed, DO-Stat, pH-stat, dynamic feed, or similar depending on the process parameters.

[0221] In some embodiments, the present disclosure teaches that the fermentation tank are run till final volume is reached after which typical shutdown procedures are initiated. In some embodiments, antifoams are used to mitigate foaming events. In addition, media components for fermentation can be defined or undefined depending on the overall impact to process dynamics and economic considerations. The process outlined here discusses a fed batch fermentation however the production of nepetalactol and/or its derivatives is not be limited to a single fermentation process.

[0222] In some embodiments, the post fermentation tank liquid is drained and centrifugation is performed to separate out the respective fractions. Then further downstream processing is carried out to separate and purify product.

[0223] In some embodiments, the present disclosure teaches that key factors that ensure increased production of target products include feed profile, temperature, O2, induction, dissolved oxygen levels (DO), pH, agitation, aeration, second phase and media composition.

[0224] In some embodiments, the fermentation process utilizes a polymer to aid in product isolation. In some embodiments, the polymer is silicone- or non-silicone-based. In some embodiments, the polymers can be homopolymers, copolymers, with varying archetypes such as block, random cross-linked (or not). The polymers may be used in a liquid or solid state, and they may have varying molecular weight distributions. The polymers can comprise polyester, polyamide, polyether, and/or polyglycol. In some embodiments, a commercial polymer may be used, for example PolyTHF, Hytrel, PT-series, or Pebax.

[0225] In some embodiments, the fermentation process utilizes solvent extraction to aid in product isolation. In some embodiments, the organic solvent that can be used for bi-phasic fermentation is dodecane.

[0226] Without being bound by theory, it is thought that the bi-phasic fermentation process disclosed herein enables precise control of growth of the recombinant microbial cells, generating sufficient biomass, and reducing product and byproduct toxicity, thereby enabling high level transcription of the requisite genes for maximum productivity of the target products. In some embodiments, the byproduct may be a metabolic by product such as citrate or ethanol, or a main pathway byproduct.

### Dynamic Control Systems

[0227] In some embodiments, the disclosure provides dynamic control systems comprising one or more genetic switches, which are regulated by a small molecule. In some embodiments, the genetic switches control the transcription of the one or more polynucleotides disclosed herein in the recombinant microbial cells of this disclosure. In some embodiments, the small molecule is an amino acid, a phosphate source, or a nitrogen source. In some embodiments, the small molecule is capable of activating transcription, while in other embodiments, the small molecule is capable of repressing transcription.

[0228] Without being bound by theory, it is thought that the genetic switches disclosed herein allow for more control of transcription and subsequent expression of the one or more polynucleotides disclosed herein, in order to mitigate the metabolic burden of expression and the toxicity of intermediate compounds formed during the synthesis of nepetalactol/nepetalactone/dihydronepetalactone. In some embodiments, the dynamic control systems facilitate control of product synthesis, thus avoiding toxicity during early stages of the fermentation process. In some embodiments, the present disclosure teaches that dynamic modulation of gene expression levels result in increased function of the nepetalactol/nepetalactone/dihydronepetalactone biosynthetic pathways.

[0229] A summary of the sequences of the present disclosure, included in the sequence listing, is provided in Table 8, below.

TABLE 8
List of SEQ ID Nos of protein sequences and the corresponding DNA sequences encoding each.

| Protein | | | DNA |
|---|---|---|---|
| SEQ ID | Gene | | SEQ ID |
| NO. | name | Source organism | NO. |
| 1 | GPPS | Saccharomyces cerevisiae | 789 |
| 2 | GPPS | Saccharomyces cerevisiae | 790 |
| 3 | GPPS | Abies grandis | 791 |
| 4 | GPPS | Catharanthus roseus | 792 |
| 5 | GPPS | Picea abies | 793 |
| 6 | GPPS | Geobacillussp.WSUCF1 | 794 |
| 7 | GPPS | Saccharomycescerevisiae(strainATCC204508/S288c)(Baker's yeast) | 795 |
| 8 | GPPS | Saccharomycescerevisiae(strainATCC204508/S288c)(Baker's yeast) | 796 |
| 9 | GPPS | Saccharomycescerevisiae(strainATCC204508/S288c)(Baker's yeast) | 797 |
| 10 | GPPS | Neosartorya fumigata (strain ATCC MYA-4609/Af293/CBS 101355/FGSC A1100) | 798 |
| | | (Aspergillus fumigatus) | |
| 11 | GPPS | Catharanthus roseus (Madagascar periwinkle) (Vinca rosea) | 799 |
| 12 | GPPS | Rhizobium acidisoli | 800 |
| 13 | GPPS | Escherichiacoli(strainK12) | 801 |
| 14 | GPPS | Escherichiacoli(strainK12) | 802 |
| 15 | GPPS | Brucella suis (strain ATCC 23445/NCTC 10510) | 803 |
| 16 | GPPS | Arabidopsisthaliana(Mouse-earcress) | 804 |
| 17 | GPPS | Buchneraaphidicolasubsp.Acyrthosiphonpisum(strainAPS)(Acyrthosiphonpisumsymbioticbacterium) | 805 |
| 18 | GPPS | Dendroctonus ponderosae (Mountain pine beetle) | 806 |
| 19 | GPPS | Picea abies (Norway spruce) (Picea excelsa) | 807 |
| 20 | GPPS | Abies grandis (Grand fir) (Pinus grandis) | 808 |
| 21 | GPPS | Corynebacterium glutamicum (strain ATCC 13032/DSM 20300/JCM 1318/LMG 3730/NC1MB 10025) | 809 |
| 22 | GPPS | Vitisvinifera(Grape) | 810 |
| 23 | GPPS | Picea abies (Norway spruce) (Picea excelsa) | 811 |
| 24 | GPPS | Picea abies (Norway spruce) (Picea excelsa) | 812 |
| 25 | GPPS | Sus scrofa (Pig) | 813 |
| 26 | GPPS | Acyrthosiphon pisum (Pea aphid) | 814 |
| 27 | GPPS | Mycobacterium tuberculosis | 815 |
| 28 | GPPS | Staphylococcus aureus (strain NCTC 8325) | 816 |
| 29 | GPPS | Geobacillussp.WSUCF1 | 817 |
| 30 | GPPS | Saccharomycescerevisiae(strainATCC204508/S288c)(Baker's yeast) | 818 |
| 31 | GPPS | Neosartorya fumigata (strain ATCC MYA-4609/Af293/CBS 101355/FGSC A1100) | 819 |
| | | (Aspergillus fumigatus) | |
| 32 | GPPS | Neosartorya fumigata (strain ATCC MYA-4609/Af293/CBS 101355/FGSC A1100) | 820 |
| | | (Aspergillus fumigatus) | |
| 33 | GPPS | Catharanthus roseus (Madagascar periwinkle) (Vinca rosea) | 821 |
| 34 | GPPS | Rhizobium acidisoli | 822 |
| 35 | GPPS | Escherichiacoli(strainK12) | 823 |
| 36 | GPPS | Brucella suis (strain ATCC 23445/NCTC 10510) | 824 |
| 37 | GPPS | Arabidopsisthaliana(Mouse-earcress) | 825 |
| 38 | GPPS | Buchneraaphidicolasubsp.Acyrthosiphonpisum(strainAPS)(Acyrthosiphonpisumsymbioticbacterium) | 826 |
| 39 | GPPS | Dendroctonus ponderosae (Mountain pine beetle) | 827 |
| 40 | GPPS | Picea abies (Norway spruce) (Picea excelsa) | 828 |
| 41 | GPPS | Abies grandis (Grand fir) (Pinus grandis) | 829 |
| 42 | GPPS | Corynebacterium glutamicum (strain ATCC 13032/DSM 20300/JCM 1318/LMG 3730/NC1MB 10025) | 830 |
| 43 | GPPS | Vitisvinifera(Grape) | 831 |
| 44 | GPPS | Picea abies (Norway spruce) (Picea excelsa) | 832 |
| 45 | GPPS | Picea abies (Norway spruce) (Picea excelsa) | 833 |
| 46 | GPPS | Picea abies (Norway spruce) (Picea excelsa) | 834 |
| 47 | GPPS | Picea abies (Norway spruce) (Picea excelsa) | 835 |
| 48 | GPPS | Picea abies (Norway spruce) (Picea excelsa) | 836 |
| 49 | GPPS | Sus scrofa (Pig) | 837 |
| 50 | GPPS | Acyrthosiphon pisum (Pea aphid) | 838 |
| 51 | GPPS | Mycobacteriumtuberculosis | 839 |
| 52 | GPPS | Staphylococcus aureus (strain NCTC 8325) | 840 |
| 53 | GPPS | Geobacillussp.WSUCF1 | 841 |
| 54 | GPPS | Geobacillussp.WSUCF1 | 842 |
| 55 | GPPS | Geobacillussp.WSUCF1 | 843 |
| 56 | GPPS | Geobacillussp.WSUCF1 | 844 |
| 57 | GPPS | Rhizobium acidisoli | 845 |
| 58 | GPPS | Rhizobium acidisoli | 846 |
| 59 | GPPS | Rhizobium acidisoli | 847 |
| 60 | GPPS | Escherichiacoli(strainK12) | 848 |
| 61 | GPPS | Escherichiacoli(strainK12) | 849 |
| 62 | GPPS | Escherichiacoli(strainK12) | 850 |
| 63 | GPPS | Brucella suis (strain ATCC 23445/NCTC 10510) | 851 |
| 64 | GPPS | Brucella suis (strain ATCC 23445/NCTC 10510) | 852 |
| 65 | GPPS | Buchneraaphidicolasubsp.Acyrthosiphonpisum(strainAPS)(Acyrthosiphonpisumsymbioticbacterium) | 853 |
| 66 | GPPS | Buchneraaphidicolasubsp.Acyrthosiphonpisum(strainAPS)(Acyrthosiphonpisumsymbioticbacterium) | 854 |
| 67 | GPPS | Buchneraaphidicolasubsp.Acyrthosiphonpisum(strainAPS)(Acyrthosiphonpisumsymbioticbacterium) | 855 |
| 68 | GPPS | Dendroctonus ponderosae (Mountain pine beetle) | 856 |
| 69 | GPPS | Picea abies (Norway spruce) (Picea excelsa) | 857 |
| 70 | GPPS | Picea abies (Norway spruce) (Picea excelsa) | 858 |
| 71 | GPPS | Picea abies (Norway spruce) (Picea excelsa) | 859 |
| 72 | GPPS | Abies grandis (Grand fir) (Pinus grandis) | 860 |
| 73 | GPPS | Abies grandis (Grand fir) (Pinus grandis) | 861 |
| 74 | GPPS | Abies grandis (Grand fir) (Pinus grandis) | 862 |
| 75 | GPPS | Picea abies (Norway spruce) (Picea excelsa) | 863 |
| 76 | GPPS | Picea abies (Norway spruce) (Picea excelsa) | 864 |
| 77 | GPPS | Picea abies (Norway spruce) (Picea excelsa) | 865 |
| 78 | GPPS | Sus scrofa (Pig) | 866 |
| 79 | GPPS | Staphylococcus aureus (strain NCTC 8325) | 867 |
| 80 | GPPS | Staphylococcus aureus (strain NCTC 8325) | 868 |
| 81 | GPPS | Staphylococcus aureus (strain NCTC 8325) | 869 |
| 82 | GPPS | Geobacillussp.WSUCF1 | 870 |
| 83 | GPPS | Saccharomycescerevisiae(strainATCC204508/S288c)(Baker's yeast) | 871 |
| 84 | GPPS | Neosartorya fumigata (strain ATCC MYA-4609/Af293/CBS 101355/FGSC A1100) (Aspergillus fumigatus) | 872 |
| 85 | GPPS | Catharanthus roseus (Madagascar periwinkle) (Vinca rosea) | 873 |
| 86 | GPPS | Catharanthus roseus (Madagascar periwinkle) (Vinca rosea) | 874 |
| 87 | GPPS | Catharanthus roseus (Madagascar periwinkle) (Vinca rosea) | 875 |
| 88 | GPPS | Rhizobium acidisoli | 876 |
| 89 | GPPS | Escherichiacoli(strainK12) | 877 |
| 90 | GPPS | Brucella suis (strain ATCC 23445/NCTC 10510) | 878 |
| 91 | GPPS | Arabidopsisthaliana(Mouse-earcress) | 879 |
| 92 | GPPS | Arabidopsisthaliana(Mouse-earcress) | 880 |
| 93 | GPPS | Arabidopsisthaliana(Mouse-earcress) | 881 |
| 94 | GPPS | Buchneraaphidicolasubsp.Acyrthosiphonpisum(strainAPS)(Acyrthosiphonpisumsymbioticbacterium) | 882 |
| 95 | GPPS | Dendroctonus ponderosae (Mountain pine beetle) | 883 |
| 96 | GPPS | Picea abies (Norway spruce) (Picea excelsa) | 884 |
| 97 | GPPS | Abies grandis (Grand fir) (Pinus grandis) | 885 |
| 98 | GPPS | Corynebacterium glutamicum (strain ATCC 13032/DSM 20300/JCM 1318/LMG 3730/NCIMB 10025) | 886 |
| 99 | GPPS | Vitisvinifera(Grape) | 887 |
| 100 | GPPS | Vitisvinifera(Grape) | 888 |
| 101 | GPPS | Vitisvinifera(Grape) | 889 |
| 102 | GPPS | Picea abies (Norway spruce) (Picea excelsa) | 890 |
| 103 | GPPS | Sus scrofa (Pig) | 891 |
| 104 | GPPS | Acyrthosiphon pisum (Pea aphid) | 892 |
| 105 | GPPS | Mycobacteriumtuberculosis | 893 |
| 106 | GPPS | Mycobacteriumtuberculosis | 894 |
| 107 | GPPS | Mycobacteriumtuberculosis | 895 |
| 108 | GPPS | Staphylococcus aureus (strain NCTC 8325) | 896 |
| 109 | GPPS | Picea abies | 897 |
| no | GPPS | Abies grandis | 898 |
| 111 | GPPS | Catharanthus roseus | 899 |
| 112 | GPPS | Picea abies | 900 |
| 113 | GPPS | Abies grandis | 901 |
| 114 | GPPS | Catharanthus roseus | 902 |
| 115 | GPPS | Abies grandis | 903 |
| 116 | GPPS | Catharanthus roseus and S. cerevisiae | 904 |
| 117 | GPPS | Picea abies | 905 |
| 118 | GPPS | Humulus lupulus | 906 |
| 119 | GPPS | Humulus lupulus | 907 |
| 120 | GPPS | Mentha × piperita | 908 |
| 121 | GPPS | Mentha × piperita | 909 |
| 122 | GPPS | Catharanthus roseus | 910 |
| 123 | GPPS | Catharanthus roseus | 911 |
| 124 | GPPS | Nepeta cataria | 912 |
| 125 | GPPS | Nepeta cataria | 913 |
| 126 | GPPS | Streptomyces aculeolatus | 914 |
| 127 | GPPS | Streptomyces sp. KO-3988 | 915 |
| 128 | GPPS | Streptomyces cinnamonensis | 916 |
| 129 | GPPS | Streptomyces longwoodensis | 917 |
| 130 | GPPS | Streptomyces sp. GKU 895 | 918 |
| 131 | GPPS | Streptomyces sp. NRRL S-37 | 919 |
| 132 | GPPS | Streptomyces aculeolatus | 920 |
| 133 | GPPS | Streptomyces sp. KO-3988 | 921 |
| 134 | GPPS | Streptomyces cinnamonensis | 922 |
| 135 | GPPS | Streptomyces longwoodensis | 923 |
| 136 | GPPS | Streptomyces sp. GKU 895 | 924 |
| 137 | GPPS | Streptomyces sp. NRRL S-37 | 925 |
| 138 | GPPS | Penicillium aethiopicum | 926 |
| 139 | GPPS | Penicillium aethiopicum | 927 |
| 140 | GES | Ocimum basilicum (Sweet basil) | 928 |
| 141 | GES | Catharanthus roseus | 929 |
| 142 | GES | Ocimum basilicum | 930 |
| 143 | GES | Valeriana officinalis | 931 |
| 144 | GES | Catharanthus roseus | 932 |
| 145 | GES | Ocimum basilicum | 933 |
| 146 | GES | Valeriana officinalis | 934 |
| 147 | GES | Catharanthus roseus | 935 |
| 148 | GES | Ocimum basilicum | 936 |
| 149 | GES | Perilla citriodora | 937 |
| 150 | GES | Valeriana officinalis | 938 |
| 151 | GES | Rosa hybrid cultivar | 939 |
| 152 | GES | Arabidopsis thaliana | 940 |
| 153 | GES | Catharanthus roseus | 941 |
| 154 | GES | Ocimum basilicum | 942 |
| 155 | GES | Perilla citriodora | 943 |
| 156 | GES | Valeriana officinalis | 944 |
| 157 | GES | Vinca minor | 945 |
| 158 | GES | Cinchona pubescens | 946 |
| 159 | GES | Rauvolfia serpentina | 947 |
| 160 | GES | Swertia japonica | 948 |
| 161 | GES | Coffea canephora | 949 |
| 162 | GES | Citrus unshiu | 950 |
| 163 | GES | Citrus unshiu | 951 |
| 164 | GES | Glycine soja | 952 |
| 165 | GES | Cynara cardunculus var. scolymus | 953 |
| 166 | GES | Dorcoceras hygrometricum | 954 |
| 167 | GES | Dorcoceras hygrometricum | 955 |
| 168 | GES | Helianthus annuus | 956 |
| 169 | GES | Actinidia chinensis var. chinensis | 957 |
| 170 | GES | Cinchona ledgeriana | 958 |
| 171 | GES | Lonicera japonica | 959 |
| 172 | GES | Cinchona pubescens | 960 |
| 173 | GES | Nepeta mussinii | 961 |
| 174 | GES | Nepeta cataria | 962 |
| 175 | GES | Nepeta cataria | 963 |
| 176 | GES | Phyla dulcis | 964 |
| 177 | GES | Vitis vinifera | 965 |
| 178 | GES | Catharanthus roseus | 966 |
| 179 | GES | Olea europaea | 967 |
| 180 | GES | Valeriana officinalis | 968 |
| 181 | GES | Valeriana officinalis | 969 |
| 182 | GES | Valeriana officinalis | 970 |
| 183 | GES | Pogostemon cablin | 971 |
| 184 | GES | Picrorhiza kurrooa | 972 |
| 185 | GES | Gentiana rigescens | 973 |
| 186 | GES | Camptotheca acuminata | 974 |
| 187 | GES | Osmanthus fragrans | 975 |
| 188 | GES | synthetic construct | 976 |
| 189 | GES | Phaseolus lunatus | 977 |
| 190 | GES | unknown | 978 |
| 191 | GES | Vigna angularis var. angularis | 979 |
| 192 | GES | Vitis vinifera | 980 |
| 193 | GES | Coffea arabica | 981 |
| 194 | GES | Coffea canephora | 982 |
| 195 | GES | Glycine soja | 983 |
| 196 | GES | Glycine soja | 984 |
| 197 | GES | Vigna angularis | 985 |
| 198 | GES | Glycine max | 986 |
| 199 | GES | Cajanus cajan | 987 |
| 200 | GES | Cajanus cajan | 988 |
| 201 | GES | Vitis vinifera | 989 |
| 202 | GES | Vitis vinifera | 990 |
| 203 | GES | Glycine max | 991 |
| 204 | GES | Lupinus angustifolius | 992 |
| 205 | GES | Handroanthus impetiginosus | 993 |
| 206 | GES | Handroanthus impetiginosus | 994 |
| 207 | GES | Lactuca sativa | 995 |
| 208 | GES | Parasponia andersonii | 996 |
| 209 | GES | Trema orientalis | 997 |
| 210 | GES | unknown | 998 |
| 211 | GES | unknown | 999 |
| 212 | GES | Ricinus communis | 1000 |
| 213 | GES | Medicago truncatula | 1001 |
| 214 | GES | Cicer arietinum | 1002 |
| 215 | GES | Glycine max | 1003 |
| 216 | GES | Glycine max | 1004 |
| 217 | GES | Phaseolus vulgaris | 1005 |
| 218 | GES | Phaseolus vulgaris | 1006 |
| 219 | GES | Phaseolus vulgaris | 1007 |
| 220 | GES | Morus notabilis | 1008 |
| 221 | GES | Vitis vinifera | 1009 |
| 222 | GES | Sesamum indicum | 1010 |
| 223 | GES | Jatropha curcas | 1011 |
| 224 | GES | Erythranthe guttata | 1012 |
| 225 | GES | Vigna radiata var. radiata | 1013 |
| 226 | GES | Vigna radiata var. radiata | 1014 |
| 227 | GES | Arachis duranensis | 1015 |
| 228 | GES | Vigna angularis | 1016 |
| 229 | GES | Vigna angularis | 1017 |
| 230 | GES | Lupinus angustifolius | 1018 |
| 231 | GES | Cajanus cajan | 1019 |
| 232 | GES | Cajanus cajan | 1020 |
| 233 | GES | Manihot esculenta | 1021 |
| 234 | GES | Hevea brasiliensis | 1022 |
| 235 | GES | Helianthus annuus | 1023 |
| 236 | GES | Olea europaea var. sylvestris | 1024 |
| 237 | GES | Lactuca sativa | 1025 |
| 238 | GES | Citrus clementina | 1026 |
| 239 | GES | Medicago truncatula | 1027 |
| 240 | GES | Cicer arietinum | 1028 |
| 241 | GES | Citrus sinensis | 1029 |
| 242 | GES | Vigna angularis | 1030 |
| 243 | GES | Helianthus annuus | 1031 |
| 244 | GES | Helianthus annuus | 1032 |
| 245 | GES | Helianthus annuus | 1033 |
| 246 | GES | Olea europaea var. sylvestris | 1034 |
| 247 | GES | Olea europaea var. sylvestris | 1035 |
| 248 | GES | Olea europaea var. sylvestris | 1036 |
| 249 | GES | Olea europaea var. sylvestris | 1037 |
| 250 | G6H | Catharanthus roseus | 1038 |
| 251 | G8H | Catharanthus roseus | 1039 |
| 252 | G8H | Catharanthus roseus | 1040 |
| 253 | G8H | Catharanthus roseus | 1041 |
| 254 | G8H | Catharanthus roseus | 1042 |
| 255 | G6H | Catharanthus roseus | 1043 |
| 256 | G8H | Catharanthus roseus | 1044 |
| 257 | G8H | Catharanthus roseus | 1045 |
| 258 | G8H | Catharanthus roseus | 1046 |
| 259 | G8H | Catharanthus roseus | 1047 |
| 260 | G6H | Catharanthus roseus | 1048 |
| 261 | G8H | Catharanthus roseus | 1049 |
| 262 | G8H | Catharanthus roseus | 1050 |
| 263 | G8H | Catharanthus roseus | 1051 |
| 264 | G8H | Nepeta cataria | 1052 |
| 265 | G6H | Nepeta mussinii | 1053 |
| 266 | G8H | Nepeta cataria | 1054 |
| 267 | G6H | Nepeta mussinii | 1055 |
| 268 | G8H | Nepeta cataria | 1056 |
| 269 | G8H | Nepeta mussinii | 1057 |
| 270 | G6H | Nepeta cataria | 1058 |
| 271 | G8H | Nepeta mussinii | 1059 |
| 272 | G6H | Vigna angularis | 1060 |
| 273 | G8H | Bacillus megaterium NBRC 15308 | 1061 |
| 274 | G8H | Bacillus megaterium NBRC 15308 | 1062 |
| 275 | G6H | Camptotheca acuminata | 1063 |
| 276 | G8H | Vinca minor | 1064 |
| 277 | G6H | Ophiorrhiza pumila | 1065 |
| 278 | G8H | Rauvolfia serpentina | 1066 |
| 279 | G8H | Lonicera japonica | 1067 |
| 280 | G8H | Erythranthe guttata | 1068 |
| 281 | G8H | Picrorhiza kurrooa | 1069 |
| 282 | G6H | Olea europaea | 1070 |
| 283 | G8H | Gentiana rigescens | 1071 |
| 284 | G8H | Nepeta cataria | 1072 |
| 285 | CPR | Arabidopsis thaliana | 1073 |
| 286 | CPR | Catharanthus roseus | 1074 |
| 287 | CPR | Catharanthus roseus | 1075 |
| 288 | CPR | Arabidopsis thaliana | 1076 |
| 289 | CPR | Catharanthus roseus | 1077 |
| 290 | CPR | Arabidopsis thaliana | 1078 |
| 291 | CPR | Catharanthus roseus | 1079 |
| 292 | CPR | Nepeta mussinii | 1080 |
| 293 | CPR | Camptotheca acuminata | 1081 |
| 294 | CPR | Arabidopsis thaliana | 1082 |
| 295 | CPR | Arabidopsis thaliana | 1083 |
| 296 | CPR | Nepeta mussinii | 1084 |
| 297 | CPR | Camptotheca acuminata | 1085 |
| 298 | CPR | Nepeta mussinii | 1086 |
| 299 | CPR | Camptotheca acuminata | 1087 |
| 300 | G8H | Swertia mussotii | 1088 |
| 301 | G8H | Camptotheca acuminata | 1089 |
| 302 | G8H | Lonicera japonica | 1090 |
| 303 | G8H | Erythranthe guttata | 1091 |
| 304 | G8H | Erythranthe guttata | 1092 |
| 305 | G8H | Nepeta cataria | 1093 |
| 306 | G8H | Picrorhiza kurrooa | 1094 |
| 307 | G8H | Picrorhiza kurrooa | 1095 |
| 308 | G8H | Nepeta mussinii | 1096 |
| 309 | G8H | Olea europaea | 1097 |
| 310 | G8H | Sesamum indicum | 1098 |
| 311 | G8H | Coffea canephora | 1099 |
| 312 | G8H | Dorcoceras hygrometricum | 1100 |
| 313 | G8H | Gentiana rigescens | 1101 |
| 314 | G8H | Vinca minor | 1102 |
| 315 | G8H | Ophiorrhiza pumila | 1103 |
| 316 | G8H | Rauvolfia serpentina | 1104 |
| 317 | G8H | Cinchona calisaya | 1105 |
| 318 | G8H | Tabernaemontana elegans | 1106 |
| 319 | G8H | Catharanthus roseus | 1107 |
| 320 | G8H | Catharanthus roseus | 1108 |
| 321 | G8H | Catharanthus roseus | 1109 |
| 322 | G8H | Catharanthus roseus | 1110 |
| 323 | CYB5 | Catharanthus roseus | 1111 |
| 324 | CYB5 | Yarrowia lipolytica CLIB122 | 1112 |
| 325 | CYB5 | Nepeta cataria | 1113 |
| 326 | CYB5 | Catharanthus roseus | 1114 |
| 327 | CYB5 | Nepeta cataria | 1115 |
| 328 | CYB5 | Artemesia annua | 1116 |
| 329 | CYB5 | Arabidopsis thaliana | 1117 |
| 330 | 8HGO | Catharanthus roseus (Madagascar periwinkle) (Vinca rosea) | 1118 |
| 331 | 8HGO | Catharanthus roseus | 1119 |
| 332 | 8HGO | Nepeta cataria | 1120 |
| 333 | 8HGO | Sesamum indicum | 1121 |
| 334 | 8HGO | Camptotheca acuminata | 1122 |
| 335 | 8HGO | Sesamum indicum | 1123 |
| 336 | 8HGO | Swertia japonica | 1124 |
| 337 | 8HGO | Ophiorrhiza pumila | 1125 |
| 338 | 8HGO | Cinchona ledgeriana | 1126 |
| 339 | 8HGO | Lonicera japonica | 1127 |
| 340 | 8HGO | Coffea canephora | 1128 |
| 341 | 8HGO | Rauvolfia serpentina | 1129 |
| 342 | 8HGO | Gentiana rigescens | 1130 |
| 343 | 8HGO | Catharanthus roseus | 1131 |
| 344 | 8HGO | Nepeta cataria | 1132 |
| 345 | 8HGO | Ocimum basilicum | 1133 |
| 346 | 8HGO | Sesamum indicum | 1134 |
| 347 | 8HGO | Capsicum annuum | 1135 |
| 348 | 8HGO | Camptotheca acuminata | 1136 |
| 349 | 8HGO | Solanum tuberosum | 1137 |
| 350 | 8HGO | Sesamum indicum | 1138 |
| 351 | 8HGO | Swertia japonica | 1139 |
| 352 | 8HGO | Ophiorrhiza pumila | 1140 |
| 353 | 8HGO | Cinchona ledgeriana | 1141 |
| 354 | 8HGO | Lonicera japonica | 1142 |
| 355 | 8HGO | Coffea canephora | 1143 |
| 356 | 8HGO | Rauvolfia serpentina | 1144 |
| 357 | 8HGO | Gentiana rigescens | 1145 |
| 358 | 8HGO | Catharanthus roseus | 1146 |
| 359 | 8HGO | Olea europaea subsp. europaea | 1147 |
| 360 | 8HGO | Sesamum indicum | 1148 |
| 361 | 8HGO | Olea europaea | 1149 |
| 362 | 8HGO | Erythranthe guttata | 1150 |
| 363 | 8HGO | Catharanthus roseus | 1151 |
| 364 | 8HGO | Ocimum basilicum | 1152 |
| 365 | 8HGO | Camptotheca acuminata | 1153 |
| 366 | 8HGO | Swertia japonica | 1154 |
| 367 | 8HGO | Cinchona ledgeriana | 1155 |
| 368 | 8HGO | Rauvolfia serpentina | 1156 |
| 369 | ISY | Arabidopsis thaliana (Mouse-earcress) | 1157 |
| 370 | ISY | Digitalis lanata (Grecian foxglove) | 1158 |
| 371 | ISY | Nepeta mussinii | 1159 |
| 372 | ISY | Nepeta cataria | 1160 |
| 373 | ISY | Catharanthus roseus (Madagascar periwinkle) (Vinca rosea) | 1161 |
| 374 | ISY | Catharanthus roseus | 1162 |
| 375 | ISY | Nepeta mussinii | 1163 |
| 376 | ISY | Nepeta cataria | 1164 |
| 377 | ISY | Olea europaea | 1165 |
| 378 | ISY | Catharanthus roseus | 1166 |
| 379 | ISY | Nepeta mussinii | 1167 |
| 380 | ISY | Nepeta cataria | 1168 |
| 381 | ISY | Nicotiana tabacum | 1169 |
| 382 | ISY | Elaeis guineensis | 1170 |
| 383 | ISY | Citrus clementina | 1171 |
| 384 | ISY | Sesamum indicum | 1172 |
| 385 | ISY | Camptotheca acuminata | 1173 |
| 386 | ISY | Cinchona pubescens | 1174 |
| 387 | ISY | Ophiorrhiza pumila | 1175 |
| 388 | ISY | Lonicera japonica | 1176 |
| 389 | ISY | Digitalis purpurea | 1177 |
| 390 | ISY | Antirrhinum majus | 1178 |
| 391 | ISY | Trifolium subterraneum | 1179 |
| 392 | ISY | Corchorus capsularis | 1180 |
| 393 | ISY | Nicotiana tabacum | 1181 |
| 394 | ISY | Panicum hallii | 1182 |
| 395 | ISY | Medicago truncatula | 1183 |
| 396 | ISY | Juglans regia | 1184 |
| 397 | ISY | Triticum urartu | 1185 |
| 398 | ISY | Citrus clementina | 1186 |
| 399 | ISY | Panicum hallii | 1187 |
| 400 | ISY | Prunus persica | 1188 |
| 401 | ISY | Tarenaya hassleriana | 1189 |
| 402 | ISY | Capsicum baccatum | 1190 |
| 403 | ISY | Medicago truncatula | 1191 |
| 404 | ISY | Nicotiana sylvestris | 1192 |
| 405 | ISY | Oryza sativa Japonica Group | 1193 |
| 406 | ISY | Oryza sativa Japonica Group | 1194 |
| 407 | ISY | Cynara cardunculus var. scolymus | 1195 |
| 408 | ISY | Ornithogalum longebracteatum | 1196 |
| 409 | ISY | Allium ursinum | 1197 |
| 410 | ISY | Convallaria majalis | 1198 |
| 411 | ISY | Populus trichocarpa | 1199 |
| 412 | ISY | Sorghum bicolor | 1200 |
| 413 | ISY | Zea mays | 1201 |
| 414 | ISY | Daucus carota subsp. sativus | 1202 |
| 415 | ISY | Nepeta cataria | 1203 |
| 416 | ISY | Catharanthus roseus | 1204 |
| 417 | ISY | Dichanthelium oligosanthes | 1205 |
| 418 | ISY | Sorghum bicolor | 1206 |
| 419 | ISY | Tarenaya hassleriana | 1207 |
| 420 | ISY | Citrus sinensis | 1208 |
| 421 | ISY | Picea sitchensis | 1209 |
| 422 | ISY | Cajanus cajan | 1210 |
| 423 | ISY | Citrus clementina | 1211 |
| 424 | ISY | Aquilegia coerulea | 1212 |
| 425 | ISY | Lonicera japonica | 1213 |
| 426 | ISY | Olea europaea subsp. europaea | 1214 |
| 427 | ISY | Thlaspi densiflorum | 1215 |
| 428 | ISY | Stellaria media | 1216 |
| 429 | ISY | Erysimum crepidifolium | 1217 |
| 430 | ISY | Morus notabilis | 1218 |
| 431 | ISY | Helianthus annuus | 1219 |
| 432 | ISY | Capsicum annuum | 1220 |
| 433 | ISY | Macleaya cordata | 1221 |
| 434 | ISY | Citrus clementina | 1222 |
| 435 | ISY | Arachis ipaensis | 1223 |
| 436 | ISY | Vitis vinifera | 1224 |
| 437 | ISY | Hevea brasiliensis | 1225 |
| 438 | ISY | Dorcoceras hygrometricum | 1226 |
| 439 | ISY | Brassica napus | 1227 |
| 440 | ISY | Ziziphus jujuba | 1228 |
| 441 | ISY | Punica granatum | 1229 |
| 442 | ISY | Capsicum baccatum | 1230 |
| 443 | ISY | Carica papaya | 1231 |
| 444 | ISY | Gossypium hirsutum | 1232 |
| 445 | ISY | Cucumis sativus | 1233 |
| 446 | ISY | Citrus clementina | 1234 |
| 447 | ISY | Catharanthus roseus | 1235 |
| 448 | ISY | Fragaria vesca subsp. vesca | 1236 |
| 449 | ISY | Prunus avium | 1237 |
| 450 | ISY | Salvia rosmarinus | 1238 |
| 451 | ISY | Elaeis guineensis | 1239 |
| 452 | ISY | Erythranthe guttata | 1240 |
| 453 | ISY | Helianthus annuus | 1241 |
| 454 | ISY | Genlisea aurea | 1242 |
| 455 | ISY | Arabidopsis thaliana | 1243 |
| 456 | ISY | Lupinus angustifolius | 1244 |
| 457 | ISY | Ananas comosus | 1245 |
| 458 | ISY | Beta vulgaris subsp. vulgaris | 1246 |
| 459 | ISY | Gossypium raimondii | 1247 |
| 460 | ISY | Citrus sinensis | 1248 |
| 461 | ISY | Amborella trichopoda | 1249 |
| 462 | ISY | Musa acuminata subsp. malaccensis | 1250 |
| 463 | ISY | Zostera marina | 1251 |
| 464 | ISY | Cephalotus follicularis | 1252 |
| 465 | ISY | Ipomoea nil | 1253 |
| 466 | ISY | Ricinus communis | 1254 |
| 467 | ISY | Elaeis guineensis | 1255 |
| 468 | ISY | Citrus clementina | 1256 |
| 469 | ISY | Musa acuminata subsp. malaccensis | 1257 |
| 470 | ISY | Theobroma cacao | 1258 |
| 471 | ISY | Gomphocarpus fruticosus | 1259 |
| 472 | ISY | Lupinus angustifolius | 1260 |
| 473 | ISY | Brachypodium distachyon | 1261 |
| 474 | ISY | Oryza brachyantha | 1262 |
| 475 | ISY | Catharanthus roseus | 1263 |
| 476 | ISY | Populus euphratica | 1264 |
| 477 | ISY | Catharanthus roseus | 1265 |
| 478 | ISY | Prunus mume | 1266 |
| 479 | ISY | Ziziphus jujuba | 1267 |
| 480 | ISY | Prunus persica | 1268 |
| 481 | ISY | Sesamum indicum | 1269 |
| 482 | ISY | Panicum hallii | 1270 |
| 483 | ISY | Fragaria vesca subsp. vesca | 1271 |
| 484 | ISY | Setaria italica | 1272 |
| 485 | ISY | Populus trichocarpa | 1273 |
| 486 | ISY | Juglans regia | 1274 |
| 487 | ISY | Jatropha curcas | 1275 |
| 488 | ISY | Hevea brasiliensis | 1276 |
| 489 | ISY | Camptotheca acuminata | 1277 |
| 490 | ISY | Malus domestica | 1278 |
| 491 | ISY | Panicum hallii | 1279 |
| 492 | ISY | Arachis duranensis | 1280 |
| 493 | ISY | Catharanthus roseus | 1281 |
| 494 | ISY | Spinacia oleracea | 1282 |
| 495 | ISY | Trifolium subterraneum | 1283 |
| 496 | ISY | Ziziphus jujuba | 1284 |
| 497 | ISY | Medicago truncatula | 1285 |
| 498 | ISY | Medicago truncatula | 1286 |
| 499 | ISY | Medicago truncatula | 1287 |
| 500 | ISY | Spinacia oleracea | 1288 |
| 501 | ISY | Juglans regia | 1289 |
| 502 | ISY | Populus tremuloides | 1290 |
| 503 | ISY | Vitis vinifera | 1291 |
| 504 | ISY | Vitis vinifera | 1292 |
| 505 | ISY | Daucus carota subsp. sativus | 1293 |
| 506 | ISY | Dendrobium catenatum | 1294 |
| 507 | ISY | Passiflora incarnata | 1295 |
| 508 | ISY | Prunus avium | 1296 |
| 509 | ISY | Daucus carota subsp. sativus | 1297 |
| 510 | ISY | Solanum tuberosum | 1298 |
| 511 | ISY | Setaria italica | 1299 |
| 512 | ISY | Antirrhinum majus | 1300 |
| 513 | ISY | Coffea canephora | 1301 |
| 514 | ISY | Panicum hallii | 1302 |
| 515 | ISY | Oryza sativa Japonica Group | 1303 |
| 516 | ISY | Setaria italica | 1304 |
| 517 | ISY | Sesamum indicum | 1305 |
| 518 | ISY | Digitalis purpurea | 1306 |
| 519 | ISY | Digitalis lanata | 1307 |
| 520 | NOR | Nepeta mussinii | 1308 |
| 521 | NOR | Nepeta mussinii | 1309 |
| 522 | NOR | Nepeta cataria | 1310 |
| 523 | NOR | Nepeta cataria | 1311 |
| 524 | NOR | Nepeta cataria | 1312 |
| 525 | NOR | Nepeta cataria | 1313 |
| 526 | NOR | Nepeta cataria | 1314 |
| 527 | NOR | Nepeta cataria | 1315 |
| 528 | NOR | Nepeta cataria | 1316 |
| 529 | NOR | Nepeta cataria | 1317 |
| 530 | NOR | Nepeta cataria | 1318 |
| 531 | NOR | Nepeta cataria | 1319 |
| 532 | NOR | Nepeta cataria | 1320 |
| 533 | NOR | Nepeta cataria | 1321 |
| 534 | NOR | Nepeta cataria | 1322 |
| 535 | NOR | Nepeta cataria or Nepeta mussinii | 1323 |
| 536 | NOR | Nepeta cataria or Nepeta mussinii | 1324 |
| 537 | NOR | Nepeta cataria or Nepeta mussinii | 1325 |
| 538 | NOR | Nepeta cataria or Nepeta mussinii | 1326 |
| 539 | NOR | Nepeta cataria or Nepeta mussinii | 1327 |
| 540 | NOR | Nepeta cataria or Nepeta mussinii | 1328 |
| 541 | NOR | Nepeta cataria or Nepeta mussinii | 1329 |
| 542 | NOR | Nepeta cataria or Nepeta mussinii | 1330 |
| 543 | NOR | Nepeta cataria or Nepeta mussinii | 1331 |
| 544 | NOR | Nepeta cataria or Nepeta mussinii | 1332 |
| 545 | NOR | Nepeta cataria or Nepeta mussinii | 1333 |
| 546 | NOR | Nepeta cataria or Nepeta mussinii | 1334 |
| 547 | NOR | Nepeta cataria or Nepeta mussinii | 1335 |
| 548 | NOR | Nepeta cataria or Nepeta mussinii | 1336 |
| 549 | NOR | Nepeta cataria or Nepeta mussinii | 1337 |
| 550 | NOR | Nepeta cataria or Nepeta mussinii | 1338 |
| 551 | NOR | Nepeta cataria or Nepeta mussinii | 1339 |
| 552 | NOR | Nepeta cataria | 1340 |
| 553 | NOR | Nepeta cataria | 1341 |
| 554 | NOR | Nepeta cataria | 1342 |
| 555 | NOR | Nepeta cataria | 1343 |
| 556 | NOR | Nepeta cataria | 1344 |
| 557 | NOR | Nepeta cataria | 1345 |
| 558 | NOR | Nepeta cataria | 1346 |
| 559 | NOR | Nepeta cataria | 1347 |
| 560 | NOR | Nepeta cataria | 1348 |
| 561 | NOR | Nepeta cataria | 1349 |
| 562 | NOR | Nepeta cataria | 1350 |
| 563 | NOR | Nepeta cataria | 1351 |
| 564 | NOR | Nepeta cataria | 1352 |
| 565 | NOR | Nepeta cataria | 1353 |
| 566 | NOR | Nepeta cataria | 1354 |
| 567 | NOR | Nepeta cataria | 1355 |
| 568 | NOR | Nepeta cataria | 1356 |
| 569 | NOR | Nepeta cataria | 1357 |
| 570 | NOR | Nepeta cataria | 1358 |
| 571 | NOR | Nepeta cataria | 1359 |
| 572 | NOR | Nepeta cataria | 1360 |
| 573 | NOR | Nepeta cataria | 1361 |
| 574 | NOR | Nepeta cataria | 1362 |
| 575 | NOR | Nepeta cataria | 1363 |
| 576 | NOR | Nepeta cataria | 1364 |
| 577 | NOR | Nepeta cataria | 1365 |
| 578 | NOR | Nepeta cataria | 1366 |
| 579 | NOR | Nepeta cataria | 1367 |
| 580 | NOR | Nepeta cataria | 1368 |
| 581 | NOR | Nepeta cataria | 1369 |
| 582 | NOR | Nepeta cataria | 1370 |
| 583 | NOR | Nepeta cataria | 1371 |
| 584 | NOR | Nepeta cataria | 1372 |
| 585 | NOR | Nepeta cataria | 1373 |
| 586 | NOR | Nepeta cataria | 1374 |
| 587 | NOR | Nepeta cataria | 1375 |
| 588 | NOR | Nepeta cataria | 1376 |
| 589 | NOR | Nepeta cataria | 1377 |
| 590 | NOR | Nepeta cataria | 1378 |
| 591 | NOR | Nepeta cataria/mussinii | 1379 |
| 592 | NOR | Nepeta cataria/mussinii | 1380 |
| 593 | NOR | Nepeta cataria/mussinii | 1381 |
| 594 | NOR | Nepeta cataria/mussinii | 1382 |
| 595 | NOR | Nepeta cataria/mussinii | 1383 |
| 596 | NOR | Nepeta cataria/mussinii | 1384 |
| 597 | NOR | Nepeta cataria/mussinii | 1385 |
| 598 | NOR | Nepeta cataria/mussinii | 1386 |
| 599 | NOR | Nepeta cataria/mussinii | 1387 |
| 600 | NOR | Nepeta cataria/mussinii | 1388 |
| 601 | NOR | Nepeta cataria/mussinii | 1389 |
| 602 | NOR | Nepeta cataria/mussinii | 1390 |
| 603 | NOR | Nepeta cataria/mussinii | 1391 |
| 604 | NOR | Nepeta cataria/mussinii | 1392 |
| 605 | NOR | Nepeta cataria/mussinii | 1393 |
| 606 | NOR | Nepeta cataria/mussinii | 1394 |
| 607 | NOR | Nepeta cataria/mussinii | 1395 |
| 608 | GPPS-GES | Valeriana officinalis/Saccharomyces cerevisiae | 1396 |
| 609 | GPPS-GES | Catharanthus roseus and S. cerevisiae | 1397 |
| 610 | G8H-CPR | engineered fusion | 1398 |
| 611 | G8H-CPR | engineered fusion | 1399 |
| 612 | G8H-CPR | engineered fusion | 1400 |
| 613 | G8H-CPR | engineered fusion | 1401 |
| 614 | G8H-CPR | engineered fusion | 1402 |
| 615 | G8H-CPR | engineered fusion | 1403 |
| 616 | G8H-CPR | engineered fusion | 1404 |
| 617 | G8H-CPR | engineered fusion | 1405 |
| 618 | G8H-CPR | engineered fusion | 1406 |
| 619 | G8H-CPR | engineered fusion | 1407 |
| 620 | G8H-CPR | engineered fusion | 1408 |
| 621 | G8H-CPR | engineered fusion | 1409 |
| 622 | G8H-CPR | engineered fusion | 1410 |
| 623 | G8H-CPR | engineered fusion | 1411 |
| 624 | G8H-CPR | engineered fusion | 1412 |
| 625 | G8H-CPR | engineered fusion | 1413 |
| 626 | G8H-CPR | engineered fusion | 1414 |
| 627 | G8H-CPR | engineered fusion | 1415 |
| 628 | G8H-CPR | engineered fusion | 1416 |
| 629 | G8H-CPR | engineered fusion | 1417 |
| 630 | G8H-CPR | engineered fusion | 1418 |
| 631 | G8H-CPR | engineered fusion | 1419 |
| 632 | G8H-CPR | engineered fusion | 1420 |
| 633 | G8H-CPR | engineered fusion | 1421 |
| 634 | G8H-CPR | engineered fusion | 1422 |
| 635 | G8H-CPR | engineered fusion | 1423 |
| 636 | G8H-CPR | engineered fusion | 1424 |
| 637 | G8H-CPR | engineered fusion | 1425 |
| 638 | G8H-CPR | engineered fusion | 1426 |
| 639 | G8H-CPR | engineered fusion | 1427 |
| 640 | G8H-CPR | engineered fusion | 1428 |
| 641 | G8H-CPR | engineered fusion | 1429 |
| 642 | G8H-CPR | engineered fusion | 1430 |
| 643 | G8H-CPR | engineered fusion | 1431 |
| 644 | G8H-CPR | engineered fusion | 1432 |
| 645 | G8H-CPR | engineered fusion | 1433 |
| 646 | G8H-CPR | engineered fusion | 1434 |
| 647 | G8H-CPR | engineered fusion | 1435 |
| 648 | G8H-CPR | engineered fusion | 1436 |
| 649 | G8H-CPR | engineered fusion | 1437 |
| 650 | G8H-CPR | engineered fusion | 1438 |
| 651 | G8H-CPR | engineered fusion | 1439 |
| 652 | G8H-CPR | engineered fusion | 1440 |
| 653 | G8H-CPR | engineered fusion | 1441 |
| 654 | G8H-CPR | engineered fusion | 1442 |
| 655 | G8H-CPR | engineered fusion | 1443 |
| 656 | G8H-CPR | engineered fusion | 1444 |
| 657 | G8H-CPR | engineered fusion | 1445 |
| 658 | G8H-CPR | engineered fusion | 1446 |
| 659 | G8H-CPR | engineered fusion | 1447 |
| 660 | G8H-CPR | engineered fusion | 1448 |
| 661 | G8H-CPR | engineered fusion | 1449 |
| 662 | G8H-CPR | engineered fusion | 1450 |
| 663 | G8H-CPR | engineered fusion | 1451 |
| 664 | G8H-CPR | engineered fusion | 1452 |
| 665 | G8H-CPR | engineered fusion | 1453 |
| 666 | G8H-CPR | engineered fusion | 1454 |
| 667 | G8H-CPR | engineered fusion | 1455 |
| 668 | G8H-CPR | engineered fusion | 1456 |
| 669 | G8H-CPR | engineered fusion | 1457 |
| 670 | G8H-CPR | engineered fusion | 1458 |
| 671 | G8H-CPR | engineered fusion | 1459 |
| 672 | G8H-CPR | engineered fusion | 1460 |
| 673 | G8H-CPR | engineered fusion | 1461 |
| 674 | G8H-CPR | engineered fusion | 1462 |
| 675 | G8H-CPR-CYB5 | engineered fusion | 1463 |
| 676 | G8H-CPR-CYB5 | engineered fusion | 1464 |
| 677 | G8H-CPR-CYB5 | engineered fusion | 1465 |
| 678 | G8H-CPR-CYB5 | engineered fusion | 1466 |
| 679 | G8H-CPR-CYB5 | engineered fusion | 1467 |
| 680 | G8H-CPR-CYB5 | engineered fusion | 1468 |
| 681 | G8H-CPR-CYB5 | engineered fusion | 1469 |
| 682 | G8H-CPR-CYB5 | engineered fusion | 1470 |
| 683 | G8H-CPR-CYB5 | engineered fusion | 1471 |
| 684 | G8H-CPR-CYB5 | engineered fusion | 1472 |
| 685 | G8H-CPR-CYB5 | engineered fusion | 1473 |
| 686 | G8H-CPR-CYB5 | engineered fusion | 1474 |
| 687 | G8H-CPR-CYB5 | engineered fusion | 1475 |
| 688 | G8H-CPR-CYB5 | engineered fusion | 1476 |
| 689 | G8H-CPR-CYB5 | engineered fusion | 1477 |
| 690 | G8H-CPR-CYB5 | engineered fusion | 1478 |
| 691 | G8H-CPR-CYB5 | engineered fusion | 1479 |
| 692 | G8H-CPR-CYB5 | engineered fusion | 1480 |
| 693 | G8H-CPR-CYB5 | engineered fusion | 1481 |
| 694 | 8HGO-ISY | engineered fusion | 1482 |
| 695 | 8HGO-ISY | engineered fusion | 1483 |
| 696 | 8HGO-ISY | engineered fusion | 1484 |
| 697 | 8HGO-ISY | engineered fusion | 1485 |
| 698 | 8HGO-ISY | engineered fusion | 1486 |
| 699 | 8HGO-ISY | engineered fusion | 1487 |
| 700 | 8HGO-ISY | engineered fusion | 1488 |
| 701 | 8HGO-ISY | engineered fusion | 1489 |
| 702 | 8HGO-ISY | engineered fusion | 1490 |
| 703 | 8HGO-ISY | engineered fusion | 1491 |
| 704 | 8HGO-ISY | engineered fusion | 1492 |
| 705 | 8HGO-ISY | engineered fusion | 1493 |
| 706 | ISY-NEPS | engineered fusion | 1494 |
| 707 | ISY-NEPS | engineered fusion | 1495 |
| 708 | ISY-NEPS | engineered fusion | 1496 |
| 709 | ISY-NEPS | engineered fusion | 1497 |
| 710 | ISY-NEPS | engineered fusion | 1498 |
| 711 | ISY-NEPS | engineered fusion | 1499 |
| 712 | ISY-NEPS | engineered fusion | 1500 |
| 713 | ISY-NEPS | engineered fusion | 1501 |
| 714 | ISY-NEPS | engineered fusion | 1502 |
| 715 | ISY-NEPS | engineered fusion | 1503 |
| 716 | ISY-NEPS | engineered fusion | 1504 |
| 717 | ISY-NEPS | engineered fusion | 1505 |
| 718 | NEPS | Nepeta mussinii | 1506 |
| 719 | NEPS | Nepeta mussinii | 1507 |
| 720 | NEPS | Catharanthus roseus | 1508 |
| 721 | NEPS | Camptotheca acuminata | 1509 |
| 722 | NEPS | Vinca minor | 1510 |
| 723 | NEPS | Rauvolfia serpentina | 1511 |
| 724 | NEPS | Catharanthus roseus | 1512 |
| 725 | NEPS | Camptotheca acuminata | 1513 |
| 726 | NEPS | Vinca minor | 1514 |
| 727 | NEPS | Rauvolfia serpentina | 1515 |
| 728 | NEPS | Nepeta mussinii | 1516 |
| 729 | NEPS | Nepeta mussinii | 1517 |
| 730 | NEPS | Catharanthus roseus | 1518 |
| 731 | NEPS | Camptotheca acuminata | 1519 |
| 732 | NEPS | Vinca minor | 1520 |
| 733 | NEPS | Rauvolfia serpentina | 1521 |
| 734 | NEPS | Andrographis_{—}paniculata | 1522 |
| 735 | NEPS | Gentiana triflora | 1523 |
| 736 | NEPS | Coffea canephora | 1524 |
| 737 | NEPS | Ophiorrhiza_{—}pumila | 1525 |
| 738 | NEPS | Phelline_{—}lucida | 1526 |
| 739 | NEPS | Vitex_{—}agnus_{—}castus | 1527 |
| 740 | NEPS | Valeriana_{—}officianalis | 1528 |
| 741 | NEPS | Stylidium_{—}adnatum | 1529 |
| 742 | NEPS | Verbena_{—}hastata | 1530 |
| 743 | NEPS | Byblis_{—}gigantea | 1531 |
| 744 | NEPS | Pogostemon_sp. | 1532 |
| 745 | NEPS | Strychnos_{—}spinosa | 1533 |
| 746 | NEPS | Corokia_{—}cotoneaster | 1534 |
| 747 | NEPS | Oxera_{—}neriifolia | 1535 |
| 748 | NEPS | Buddleja_sp. | 1536 |
| 749 | NEPS | Gelsemium_{—}sempervirens | 1537 |
| 750 | NEPS | Utricularia_sp. | 1538 |
| 751 | NEPS | Scaevola_sp. | 1539 |
| 752 | NEPS | Menyanthes_{—}trifoliata | 1540 |
| 753 | NEPS | Pinguicula_{—}caudata | 1541 |
| 754 | NEPS | Psychotria_{—}ipecacuanha | 1542 |
| 755 | NEPS | Dipsacus_{—}sativum | 1543 |
| 756 | NEPS | Exacum_{—}affine | 1544 |
| 757 | NEPS | Chionanthus_{—}retusus | 1545 |
| 758 | NEPS | Allamanda_{—}cathartica | 1546 |
| 759 | NEPS | Phyla_{—}dulcis | 1547 |
| 760 | NEPS | Ligustrum_{—}sinense | 1548 |
| 761 | NEPS | Pyrenacantha_{—}malvifolia | 1549 |
| 762 | NEPS | Sambucus_{—}canadensis | 1550 |
| 763 | NEPS | Leonurus_{—}japonicus | 1551 |
| 764 | NEPS | Ajuga_{—}reptans | 1552 |
| 765 | NEPS | Paulownia_{—}fargesii | 1553 |
| 766 | NEPS | Caiophora_{—}chuquitensis | 1554 |
| 767 | NEPS | Plantago_{—}maritima | 1555 |
| 768 | NEPS | Antirrhinum_{—}braun | 1556 |
| 769 | NEPS | Cyrilla_{—}racemiflora | 1557 |
| 770 | NEPS | Hydrangea_{—}quercifolia | 1558 |
| 771 | NEPS | Cinchona pubescens | 1559 |
| 772 | NEPS | Actinidia chinensis var. chinensis | 1560 |
| 773 | NEPS | Swertia japonica | 1561 |
| 774 | NEPS | Sesamum indicum | 1562 |
| 775 | NOR | Isodon_{—}rubescens | 1563 |
| 776 | NOR | Prunella_{—}vulgaris | 1564 |
| 777 | NOR | Agastache_{—}rugosa | 1565 |
| 778 | NOR | Melissa_{—}officinalis | 1566 |
| 779 | NOR | Micromeria_{—}fruticosa | 1567 |
| 780 | NOR | Plectranthus_{—}caninus | 1568 |
| 781 | NOR | Rosmarinus officinalis | 1569 |
| 782 | NOR | Nepeta mussinii | 1570 |
| 783 | CYB5R | Catharanthus roseus | 1571 |
| 784 | CYB5R | Nepeta cataria | 1572 |
| 785 | CYB5R | Arabidopsis thaliana | 1573 |
| 786 | CYB5R | Catharanthus roseus | 1574 |
| 787 | CYB5R | Nepeta cataria | 1575 |
| 788 | CYB5R | Arabidopsis thaliana | 1576 |
| 1642 | NOR | Nepeta cataria | 1725 |
| 1643 | NOR | Nepeta cataria | 1726 |
| 1644 | NOR | Nepeta cataria | 1727 |
| 1645 | GPPS-GES | engineered fusion | 1728 |
| 1646 | GPPS-GES | engineered fusion | 1729 |
| 1647 | GPPS-GES | engineered fusion | 1730 |
| 1648 | GPPS-GES | engineered fusion | 1731 |
| 1649 | GPPS-GES | engineered fusion | 1732 |
| 1650 | GPPS-GES | engineered fusion | 1733 |
| 1651 | GPPS-GES | engineered fusion | 1734 |
| 1652 | GPPS-GES | engineered fusion | 1735 |
| 1653 | GPPS-GES | engineered fusion | 1736 |
| 1654 | GPPS-GES | engineered fusion | 1737 |
| 1655 | GPPS-GES | engineered fusion | 1738 |
| 1656 | GPPS-GES | engineered fusion | 1739 |
| 1657 | GPPS-GES | engineered fusion | 1740 |
| 1658 | GPPS-GES | engineered fusion | 1741 |
| 1659 | GPPS-GES | engineered fusion | 1742 |
| 1660 | GPPS-GES | engineered fusion | 1743 |
| 1661 | GPPS-GES | engineered fusion | 1744 |
| 1662 | GPPS-GES | engineered fusion | 1745 |
| 1663 | GPPS-GES | engineered fusion | 1746 |
| 1664 | GPPS-GES | engineered fusion | 1747 |
| 1665 | GPPS-GES | engineered fusion | 1748 |
| 1666 | GPPS-GES | engineered fusion | 1749 |
| 1667 | GPPS-GES | engineered fusion | 1750 |
| 1668 | GPPS-GES | engineered fusion | 1751 |
| 1669 | GPPS-GES | engineered fusion | 1752 |
| 1670 | GPPS-GES | engineered fusion | 1753 |
| 1671 | GPPS-GES | engineered fusion | 1754 |
| 1672 | GPPS-GES | engineered fusion | 1755 |
| 1673 | GPPS-GES | engineered fusion | 1756 |
| 1674 | GPPS-GES | engineered fusion | 1757 |
| 1675 | GPPS-GES | engineered fusion | 1758 |
| 1676 | GPPS-GES | engineered fusion | 1759 |
| 1677 | GPPS-GES | engineered fusion | 1760 |
| 1678 | GPPS-GES | engineered fusion | 1761 |
| 1679 | GPPS-GES | engineered fusion | 1762 |
| 1680 | GPPS-GES | engineered fusion | 1763 |
| 1681 | GPPS-GES | engineered fusion | 1764 |
| 1682 | GPPS-GES | engineered fusion | 1765 |
| 1683 | GPPS-GES | engineered fusion | 1766 |
| 1684 | GPPS-GES | engineered fusion | 1767 |
| 1685 | GPPS-GES | engineered fusion | 1768 |
| 1686 | GPPS-GES | engineered fusion | 1769 |
| 1687 | GPPS-GES | engineered fusion | 1770 |
| 1688 | GPPS-GES | engineered fusion | 1771 |
| 1689 | GPPS-GES | engineered fusion | 1772 |
| 1690 | GPPS-GES | engineered fusion | 1773 |
| 1691 | GPPS-GES | engineered fusion | 1774 |
| 1692 | GPPS-GES | engineered fusion | 1775 |
| 1693 | GPPS-GES | engineered fusion | 1776 |
| 1694 | GPPS-GES | engineered fusion | 1777 |
| 1695 | ISY | Phialophora attae | 1778 |
| 1696 | ISY | Tarenaya spinosa | 1779 |
| 1697 | ISY | Trifolium pratense | 1780 |
| 1698 | ISY | Oryza glumipatula | 1781 |
| 1699 | ISY | Triticum aestivum | 1782 |
| 1700 | ISY | Oryza glumipatula | 1783 |
| 1701 | ISY | Madurella mycetomatis | 1784 |
| 1702 | ISY | Phaedon cochleariae | 1785 |
| 1703 | ISY | Glycine max | 1786 |
| 1704 | ISY | Triticum aestivum | 1787 |
| 1705 | ISY | Olea europaea | 1788 |
| 1706 | ISY | Camptotheca acuminata | 1789 |
| 1707 | ISY | Musa acuminata subsp. malaccensis | 1790 |
| 1708 | ISY | Arabidopsis thaliana | 1791 |
| 1709 | ISY | Digitalis lanata | 1792 |
| 1710 | ISY | Musa acuminata subsp. malaccensis | 1793 |
| 1711 | ISY | Musa acuminata subsp. malaccensis | 1794 |
| 1712 | ISY | Anthurium amnicola | 1795 |
| 1713 | ISY | Cinchona_{—}Ledgeriana | 1796 |
| 1714 | ISY | Triticum aestivum | 1797 |
| 1715 | ISY | Aegilops tauschii | 1798 |
| 1716 | ISY | Vinca minor | 1799 |
| 1717 | ISY | Cinchona pubescens | 1800 |
| 1718 | ISY | Ophiorrhiza pumila | 1801 |
| 1719 | ISY | Swertia japonica | 1802 |
| 1720 | ISY | Lonicera_{—}japonica | 1803 |
| 1721 | ISY | Rauwolfia serpentina | 1804 |
| 1722 | ISY | Lonicera japonica | 1805 |
| 1723 | ISY | Oryza sativa subsp. japonica | 1806 |
| 1724 | ISY | Phaedon cochleariae | 1807 |

[0230] It is to be understood that the description above as well as the examples that follow are intended to illustrate, and not limit, the scope of the invention. Other aspects, advantages and modifications within the scope of the invention will be apparent to those skilled in the art to which the invention pertains.

[0231] All patents, patent applications, references, and journal articles cited in this disclosure are expressly incorporated herein by reference in their entireties for all purposes.

### EXAMPLES

### Example 1: Cloning and Expression of Nepetalactone Oxidoreductases in Escherichia coli Capable of Converting Nepetalactol to Nepetalactone

### Identification of NOR Candidates

[0232] Publicly available next-generation RNA sequencing data from Nepeta cataria was obtained from NCBI (SRR5150709). The reads were extracted and assembled into a transcriptome. The protein sequence for horse liver alcohol dehydrogenase (HLADH) was used as a BLAST query to identify alcohol dehydrogenases candidates from Nepeta cataria that might catalyze conversion of nepetalactol to nepetalactone.

[0233] Thirty-nine candidates were identified and the coding sequences were codon optimized for expression in E. coli. The codon-optimized nucleotide sequences were synthesized with an upstream T7 promoter and a ribosome binding site (RBS) and a downstream T7 terminator sequence by Integrated DNA Technologies (IDT). Synthesized DNA was retrieved as plasmids containing the expression cassettes within a backbone containing the kanamycin resistance marker provided by IDT.

### Heterologous Expression of NOR Candidates

[0234] The plasmids were individually transformed into chemically competent BL21 (DE3) cells. pUC19 was also transformed into BL21 (DE3) to produce a strain that could serve as a negative control. Transformants were selected and grown overnight with shaking in LB medium containing kanamycin. Glycerol stocks were prepared by mixing overnight culture with 50% glycerol in a 1:1 ratio. Glycerol stocks were frozen at −80° C.

[0235] BL21 (DE3) strains were streaked out on LB plates containing kanamycin from glycerol stock and grown overnight at 37° C. A single colony was inoculated into 4 mL of LB medium containing kanamycin in 15 mL disposable culture tubes and incubated overnight at 30° C. with shaking at 250 rpm. 500 μL of the overnight culture was subcultured into 50 mL of LB medium containing kanamycin in a 250 mL baffled flask. The culture was grown at 37° C. and the optical density at 600 nm (OD600) was monitored. When OD600 reached between 0.6-1, the cultures were cooled on ice for 15 minutes. The cultures were then induced with 100 μM of isopropyl β-D-1-thiogalactopyranoside and incubated at 15° C. with shaking at 250 rpm for roughly 20 hours. Cultures were pelleted by centrifugation in 50 mL centrifuge tubes. The supernatant was decanted and the pellets were frozen at −20° C. for later processing.

### In Vitro Characterization of NOR Candidates

[0236] Pellets were thawed on ice and resuspended with 3 mL of cold lysis buffer: 50 mM sodium phosphate, pH=7.4, 100 mM sodium chloride. All remaining steps were performed either on ice or at 4° C. The cell mixture was transferred to a 15 mL centrifuge tube and disrupted with three rounds of sonication using the Branson Sonitier 450 with a double-level microtip at 70% amplitude. A single round of sonication consisted of 6 cycles of 10 seconds with the sonicator on, and 10 seconds off Between each round, the cell mixture was allowed to sit on ice for a minute to cool. The lysed cell mixture was transferred to 1.7 mL centrifuge tubes and centrifuged at maximum speed in a microcentrifuge for 20 minutes. The supernatant (clarified cell lysate) was collected in a separate tube and used for in vitro characterization.

[0237] The in vitro reactions were setup as follows: 2 μL of 100 mM NAD+ or NADP+ and 10 μL of 100 uM nepetalactol was added to 188 μL of the clarified cell lysate. The reactions were incubated at 30° C. shaking at 200 rpm for 2 hours. As a positive control, 2 μL of 100 mM NAD+, 2 μL of 100 mM NADP+ and 10 μL of 100 μM nepetalactone was added to 186 μL of clarified lysate from a strain harboring pUC 19 and incubated for 1 hr. The reactions were extracted with one volume of ethyl acetate. The organic layer was withdrawn and analyzed with gas chromatography coupled to mass spectrometry (GC-MS). Authentic standards were run to confirm identities of analytes.

[0238] The results are shown in FIG. 2. Three candidate genes NcatNORI5 (protein SEQ ID NO: 561), NcatNOR21 (protein SEQ ID NO: 566), and NcatNOR34 (protein SEQ ID NO: 578) [(DNA SEQ ID NOs: 1725-1727)] were found to encode NORs which can oxidize nepetalactol to nepetalactone, the first such demonstration.

### Example 2—Expression and Activities of Various Iridoid Synthases

[0239] A variety of iridoid synthases (ISYs, SEQ ID NOs: 1181, 1256, 1257, 1306, 30 1191, 1255, 1269, 1203, 1791, 1801, 1215, 1281, 1190, 1217, 1800, 1234, 1277, 1233, 1300, 1249, 1805) were heterologously expressed in E. coli from a plasmid using a T7 expression system. E. coli cultures were grown until OD600—0.6 and induced with 1 mM IPTG and grown for 7.5 h at 28° C. or 20 h at 15° C. Cells were harvested and chemically lysed by Bugbuster HT (EMD Millipore) following manufacturer's instructions. Cell lysates were clarified by centrifugation and were tested for in vitro conversion of 8-oxogeranial to nepetalactol in the presence of NADH and NADPH (see FIG. 3). 2 μL of cell lysate was added to a reaction mixture containing 200 mM HEPES, pH=7.3, 100 μM of 8-oxogeranial, 100 μM NADH and 100 μM of NADPH. The reaction mixture was extracted with 300 μL of ethyl acetate. The organic extract was analyzed by LC-MS for quantification of nepetalactol.

### Example 3: Cloning and Expression of Nepetalactol Synthases Capable of Producing Nepetalactol

[0240] Four putative nepetalactol synthases (NEPS_1 to NEPS_4; DNA SEQ ID NO: 1518-1521; protein SEQ ID NOs: 730-733) were identified by examining publicly available transcriptome data (medicinalplantgenomics.msu.edu) from four plant species that are known to produce monoterpene indole alkaloids (Catharanthus roseus, Camptotheca acuminata, Vinca minor, and Rauvolfia serpentina). Transcripts that encoded these NEPS were highly co-expressed with biosynthetic gene homologs that catalyze the formation of loganic acid from geraniol, which proceeds through the intermediate, nepetalactol. This analysis suggested the involvement of these NEPS candidates in the biosynthesis of loganic acid from geraniol, perhaps in nepetalactol formation. All four NEPSs were heterologously expressed in E. coli from a plasmid using a T7 expression system. E. coli cultures were grown until OD600˜0.6 and induced with 100 μM IPTG and grown for 16 h at 16° C. Cells were harvested and chemically lysed by Bugbuster HT (EMD Millipore) following manufacturer's instructions. Cell lysates were clarified by centrifugation. NEPS activity was tested individually by the addition of 10 μL of cell lysate to a reaction mixture containing 50 mM HEPES, pH=7.3, 500 μM of 8-oxogeranial, 1 mM NADPH and 10 μL of cell lysate that contains one of three iridoid synthases (ISY) in a final volume of 200 μL. The ISY s include Catharanthus roseus iridoid synthase (ISY; SEQ ID NO. 1162), C. roseus ISY “del22” (SEQ ID NO. 1166), which is truncated at the N-terminus by 22 amino acids, and Nepeta mussinii ISY (SEQ ID NO. 1159) (see FIG. 4). The reaction mixture was extracted with 300 μL of ethyl acetate, and the organic layer was analyzed by LC-MS for the quantification of nepetalactol. In every case, the presence of the NEPS enhanced production of nepetalactol (11- to 40-fold increase) compared to in vitro reactions that contained cell lysate from E. coli that did not express NEPS.

### Example 4—Expression and Activities of Various 8-Hydroxygeraniol Oxidoreductases

[0241] A variety of 8-hydroxygeraniol oxidoreductases (8HGOs; SEQ ID NO: 1132, 1134, 1136, 1138-1146) were heterologously expressed in E. coli from a plasmid using a T7 expression system. E. coli cultures were grown until OD600—0.6 and induced with 100 μM IPTG and grown for 16 h at 16° C. Cells were harvested and chemically lysed by Bugbuster HT (EMD Millipore) following manufacturer's instructions. Cell lysates were clarified by centrifugation. 8HGO activity was tested by the addition of 1 μL of cell lysate to a reaction mixture containing 50 mM of bis-tris propane, pH=9.0, 1 mM NADPH, 1 mM NAD+, 500 μM of 8-hydroxygeraniol, 1 μL of cell lysate containing Nepeta mussinii ISY (SEQ ID NO: 1159) and 1 μL of cell lysate containing NEPS_1 (SEQ ID NO: 1518) in a final reaction volume of 100 μL. The reaction mixture was extracted with 300 μL of ethyl acetate, and the organic layer was analyzed by LC-MS for quantification of nepetalactol. (see FIG. 5).

### Example 5—Cloning and Expression of Nepetalactone Oxidoreductases in Saccharomyces cerevisiae Capable of Converting Nepetalactol to Nepetalactone

### Identification of NOR Candidates

[0242] An additional list of seventeen candidates were identified from the de novo transcriptome assembly produced above in EXAMPLE 1. Briefly, hmmscan from the software, HMMER was used to functionally annotate all predicted peptides from the assembly based on their best matching Pfam hidden markov model (HMM) by E-value. All HMMs related to oxidoreductase activity were investigated further by BLAST and filtered to remove sequences with high sequence identity to any sequences from the non-redundant database to further narrow the list of candidates. The sequences of these candidates and the original thirty-nine candidates described in EXAMPLE 1 were codon-optimized for expression in S. cerevisiae (SEQ ID NO: 1340-1395) and were synthesized by a third-party and cloned into the 2p plasmid backbone, pESC-URA.

### Heterologous Expression and Testing of NOR Candidates

[0243] The plasmids were individually transformed into chemically competent Saccharomyces cerevisiae cells as described in EXAMPLE 2. Transformants were selected on SD-URA agar plates. Three to four replicates were picked into SD-URA liquid medium and cultured at 30° C. for one to two days with shaking at 1000 rpm. Cultures were glycerol stocked at a final concentration of 16.6% glycerol and stored at −80° C. until later use.

[0244] 10 μL of the glycerol stocked strains was inoculated into 300 μL of minimal media lacking uracil, and containing 4% glucose in 96-well plates to produce seed cultures. The plates were incubated at 30° C. at 1000 rpm for 1-2 days. 10 μL of the seed cultures was then inoculated into 300 μL of minimal media lacking uracil, and containing 2% galactose and 100 mg/L of nepetalactol. 30 μL of methyl oleate was next added to the wells. The main culture plates were further incubated at 30° C., 1000 rpm for 24 hours before assays were performed to assess cell growth and titer. Cell growth and titer assays were performed as described above in EXAMPLE 2.

[0245] All tested strains produced at least some basal level of nepetalactone (−600 ug/L; see FIG. 7), including a control strain that did not contain a plasmid for expression of a NOR candidate. No nepetalactone was observed in the non-inoculated control wells. Altogether, these results suggest that Saccharomyces cerevisiae has low background levels of NOR activity. One of the tested strains expressing GAR_NOR15 (SEQ ID NO: 1393) produced significantly more nepetalactone (93 mg/L), far exceeding basal levels, and demonstrating that this heterologous protein candidate has activity for converting nepetalactol into nepetalactone.

### Example 6—Characterization of Other NEPS Enzymes

[0246] Proteins predicted to be NEPS enzymes were identified as comprising amino acid sequences SEQ ID Nos. 718-774. Four of these proteins (comprising amino acid sequences of SEQ ID Nos. 730-733) were tested and were confirmed to have NEPS enzymatic activity (see Example 3). A sequence alignment of these four sequences is shown in FIG. 8. A Hidden Markov model (HMM) analysis of these four protein sequences showed that they share a Pfam domain pfam12697. The presence of the Pfam domain pfam12697 distinguishes these NEPS enzymes from the NEPS enzymes described thus far (see, for e.g., Lichman et al., Nature Chemical Biology, Vol. 15 Jan. 2019, 71-79), which do not contain this protein domain. This domain essentially spans the entire length of the sequences shown in FIG. 8, which are roughly 260 amino acids long. The domain maps to the following portions of the sequences shown in FIG. 8: SEQ ID NO 730: amino acids 8-246; SEQ ID NO 731: amino acids 11-253; SEQ ID NO 732: amino acids 9-247; SEQ ID NO 733: amino acids 11-249.

[0247] Additionally, other proteins predicted to be NEPS enzymes comprising amino acid sequences of SEQ ID Nos. 734-774 will be tested for NEPS enzymatic activity of converting an enol intermediate substrate to nepetalactol and characterized as described above.

[0248] A protein BLAST was performed for SEQ ID NO: 720 to identify more proteins with predicted NEPS enzymatic activity. Similar BLAST results are expected for proteins with the amino acid sequences of SEQ ID Nos. 718, 719, and 721-774. The proteins predicted as being NEPS enzymes will be tested for NEPS enzymatic activity of converting an enol intermediate substrate to nepetalactol. Additionally, the ratio of nepetalactol stereoisomers produced by each of the NEPS enzymes will also be measured, thereby identifying NEPS enzymes, and variants thereof, which can produce defined ratios of nepetalactol stereoisomers.

### Example 7—Characterization of Other NOR Enzymes

[0249] Proteins predicted to be NOR enzymes were identified as comprising amino acid sequences SEQ ID Nos. 520-607, 775-782 and 1642-1644. A MUSCLE protein alignment was performed of NOR enzymes comprising the amino acid sequences of SEQ ID NO 605, 718, 728, 1642, 1643, and 1644; and the NOR comprising SEQ ID NO: 520 described in the art previously (see Lichman et al. Nature Chemical Biology, Vol. 15 Jan. 2019, 71-79). The results showed that there is less than 20% identity between the NORs of this disclosure and the NOR described previously in the art, as shown in FIG. 11, demonstrating that the genus of NORs described in this disclosure is novel over the existing knowledge in the art.

[0250] A protein BLAST search was performed for each individual sequence to identify more proteins with predicted NOR enzymatic activity. Further an InterProScan was performed for SEQ ID NO 520 (NEPS1 of Lichman et al.) and NOR sequences comprising amino acid sequences SEQ ID NOs 605, 1642-1644 disclosed herein, and the results are shown in Table 9.

TABLE 9

| | | | Amino acids |
|---|---|---|---|
| SEQ ID | | | spanning the |
| NO. | Domains | ID | domain |
| 520 | Short-chain dehydrogenase/reductase | IPR002347 | 19-36; 91-102; 167- |
| | SDR | | 186; 188-205; 226-246 |
| 520 | NAD(P)-binding domain superfamily | IPR036291 | 16-263 |
| 605 | NAD-dependent epimerase/dehydratase | IPR001509 | 9-241 |
| 605 | NAD(P)-binding domain superfamily | IPR036291 | 3-315 |
| 1642 | GroES-like superfamily | IPR011032 | 19-184 |
| 1642 | NAD(P)-binding domain superfamily | IPR036291 | 157-321 |
| 1642 | Polyketide synthase, enoylreductase | IPR020843 | 23-351 |
| | domain | | |
| 1642 | Alcohol dehydrogenase, N-terminal | IPR013154 | 38-151 |
| 1642 | Alcohol dehydrogenase, C-terminal | IPR013149 | 194-317 |
| 1642 | Alcohol dehydrogenase, zinc-type, | IPR002328 | 71-85 |
| | conserved site | | |
| 1643 | GroES-like superfamily | IPR011032 | 16-178 |
| 1643 | NAD(P)-binding domain superfamily | IPR036291 | 151-315 |
| 1643 | Polyketide synthase, enoylreductase | IPR020843 | 17-345 |
| | domain | | |
| 1643 | Alcohol dehydrogenase, N-terminal | IPR013154 | 32-144 |
| 1643 | Alcohol dehydrogenase, C-terminal | IPR013149 | 188-311 |
| 1643 | Alcohol dehydrogenase, zinc-type, | IPR002328 | 75-79 |
| | conserved site | | |
| 1644 | GroES-like superfamily | IPR011032 | 61-260 |
| 1644 | NAD(P)-binding domain superfamily | IPR036291 | 266-399 |
| 1644 | Polyketide synthase, enoylreductase | IPR020843 | 72-432 |
| | domain | | |
| 1644 | Alcohol dehydrogenase, N-terminal | IPR013154 | 89-195 |
| 1644 | Alcohol dehydrogenase, C-terminal | IPR013149 | 264-394 |

[0251] These results show that the NOR sequences of this disclosure contain different domains as compared to the NOR described in Lichman et al., which contains the short-chain dehydrogenase/reductase SDR, and the NAD(P)-binding domain superfamily.

[0252] Additionally, other proteins disclosed herein which are predicted to be NOR enzymes will be tested for NOR enzymatic activity of converting a nepetalactol substrate to nepetalactone and further characterized as described above.

### Example 8—Introduction of a Partial Biosynthetic Pathway for Nepetalactone into Yeast Plasmid/DNA Design

[0253] Genes were synthesized by a third-party and plasmids were assembled by standard DNA assembly methods either in-house or by a third-party. The plasmid DNA was then used to chromosomally integrate the metabolic pathway inserts into Saccharomyces cerevisiae. Plasmids were designed for ‘two plasmid, split-marker’ integrations. Briefly, two plasmids were constructed for each targeted genomic integration. The first plasmid contains an insert made up of the following DNA parts listed from 5′ to 3′: 1) a 5′ homology arm to direct genomic integration; 2) a payload consisting of cassettes for heterologous gene expression; 3) the 5′ half of a URA3 selection marker cassette. The second plasmid contains an insert made up of the following DNA parts listed from 5′ to 3′: 1) the 3′ half of a URA3 selection marker cassette with 100 bp or more DNA overlap to the 3′ end of the 5′ half of the URA selection marker cassette used in the first plasmid; 2) an optional payload consisting of cassettes for heterologous gene expression: 3) a 3′ homology arm to direct genomic integration. The inserts of both plasmids are flanked by meganuclease sites. Upon digestion of the plasmids using the appropriate meganucleases, 20 inserts are released and transformed into cells as linear fragments. A triple-crossover event allows integration of the desired heterologous genes and reconstitution of the full URA3 marker allowing selection for uracil prototrophy. For recycling of the URA3 marker, the URA3 cassette is flanked by 100-200 bp direct repeats, allowing for loop-out and counterselection with 5-Fluoroorotic Acid (5-FOA).

[0254] Cassettes for heterologous expression contain the gene coding sequence under the transcriptional control of a promoter and terminator. Promoters and terminators may be selected from any elements native to S. cerevisiae. Promoters may be constitutive or inducible. Inducible promoters include the bi-directional pGAL1/pGAL1O (pGAL1-10) promoter and pGAL 7 promoter, which are induced by galactose.

### Strain Construction

[0255] Cells were grown in yeast extract peptone dextrose (YPD) overnight at 30° C., shaking at 250 rpm. The cells were diluted to an optical density at 600 nm (OD600)=0.2 in 50 mL of YPD and grown to an OD600=0.6-0.8. Cells were harvested by centrifugation, washed with water, washed with 100 mM lithium acetate, and resuspended in 100 mM lithium acetate to a final OD600=100. 15 μL of the cell resuspension was directly added to the DNA. A PEG mixture containing 100 μL of 50% w/v PEG3350, 4 μL of 10 mg/mL salmon sperm DNA, 15 μL of 1 M lithium acetate was added to the DNA and 5 cell mixture, and well-mixed. The transformation mix was incubated at 30° C. for 30 min and 42° C. for 45 min.

[0256] Following heat-shock, the transformation mix was plated on agar plates containing synthetic defined minimal yeast media lacking uracil (SD-URA). Plates were incubated at 30° C. for 2-3 days. Up to eight transformants were picked for each targeted 10 strain into 1 mL of SD-URA liquid media of a 96-well plate and grown at 30° C. with shaking at 1000 rpm and 90% relative humidity (RH). Cultures were lysed using Zymolyase, and a PCR was performed using the resulting lysate to verify successful integration using primers that targeted the 5′ integration junction. Glycerol stocks were prepared from the cultures at a final concentration of 16.6% glycerol and were stored at −80° C. for later use.

[0257] To recycle the URA3 selection marker, selected strains were inoculated into SD-URA and grown overnight at 30° C., 1000 rpm and 90% RH. Strains were then plated onto 0.1% 5-FOA plates (Teknova) and incubated at 30° C. for 2-3 days. Single colonies were re-streaked onto 0.1% 5-FOA plates. Single colonies were selected from the re-streak and colony PCR was performed in order to verify loop-out of the URA3 marker. Colonies were also tested for lack of growth in liquid SD-URA medium. Further integrations were performed as described above.

### Strain Cultivation and Target Compound Production

[0258] From the frozen glycerol stocks, successful integrants were inoculated into a seed plate containing 300 μL of SD-URA. The 96-well plate was incubated at 30° C., 1000 rpm, 90% RH for 48 hours. For each successfully built strain, three biological replicates were tested. If fewer than three successful transformants were obtained for each targeted strain genotype, the existing biological replicates were duplicated. Strains were randomized across a 96-well plate. After the 48 hours of growth, 8 μL of the cultures from the seed plates were used to inoculate a main cultivation plate containing 250 μL of minimal medium with 2°/o glucose and grown for 16 hour at 30° C., 1000 rpm, 90% RH. 50 μL of minimal medium with 12% galactose was added to the cultures to induce expression of heterologous genes under the control of galactose promoters, followed by the addition of 30 μL of methyl oleate. After 9 hours of additional growth, 3 μL of a 50 mg/mL substrate feed (geraniol or 8-hydroxygeraniol) prepared in DMSO was dispensed into the cultures. Cells were grown for an additional 15 hours before assays were performed to assess cell growth and titer.

[0259] Cell density was determined using a spectrophotometer by measuring the absorbance of each well at 600 nm. 20 μL of culture was diluted into 180 μL of 175 mM sodium phosphate buffer, pH 7.0 in a clear-bottom plate. The plates were shaken for 25 sat 750 rpm immediately before being measured on a Tecan M1 000 spectrophotometer. A non-inoculated control well was included as a blank. 300 μL of ethyl acetate was added to the cultures. The plates were sealed with a PlateLoc Thermal Microplate Sealer and the plates were shaken for one min at 750 rpm. The plates were centrifuged and the ethyl acetate layer was collected and analyzed by liquid chromatography coupled to mass spectrometry (LC-MS). Target analytes were quantified against authentic standards.

[0260] FIG. 6 displays the nepetalactone and nepetalactol titers of several engineered strains compared to non-inoculated control wells and the wild-type strain, CEN.PK113-7D. Table 10 shows the strain genotypes of engineered strains. Gene deletions are indicated by Δ. “iholl” indicates that the cassette has been integrated at a neutral locus, specifically, an intergenic region between HOL1 and a proximal gene.

TABLE 10

| strain | |
|---|---|
| name | genotype |
| ScA01 | Δadh6: prGAL1-10:RsNEPS, Nc8HGO; pGAL7:NmISY; pGAL1-10:Cc8HGO, NcNOR; URA3 |
| ScA02 | Δoye2: pGAL1-10:RsNEPS, Nc8HGO; pGAL7:NmISY; pGAL1-10:Cc8HGO, NcNOR; URA3 |
| ScA03 | ihol1: pGAL1-10:RsNEPS, Nc8HGO; pGAL7:NmISY; pGAL1-10:Cc8HGO, NcNOR; URA3 |
| ScB02 | ihol1: pGAL1-10:RsNEPS, Nc8HGO; pGAL7:NmISY; pGAL1-10:Cc8HGO, NcNOR |
| | Δprb1: ADE1; pGAL7:NmG8H; pGAL1-10:CrCYB5, CrCPR; URA3 |
| ScB03 | ihol1: pGAL1-10:RsNEPS, Nc8HGO: pGAL7:NmISY; pGAL1-10:Cc8HGO, NcNOR |
| | Δpep4: ADE1; pGAL7:NmG8H; pGAL1-10:CrCYB5, CrCPR; URA3 |
| ScC01 | ihol1: pGAL1-10:RsNEPS, Nc8HGO; pGAL7:NmISY: pGAL1-10:Cc8HGO, NcNOR |
| | Δprb1: ADE1; pGAL7:NmG8H; pGAL1-10:CrCYB5, CrCPR |
| | Δho: pGAL1-10:ObGES, ScERG20(WW); URA3 |
| ScC02 | ihol1: pGAL1-10:RsNEPS, Nc8HGO; pGAL7:NmISY; pGAL1-10:Cc8HGO, NcNOR |
| | Δprb1: ADE1; pGAL7:NmG8H; pGAL1-10:CrCYB5, CrCPR |
| | Δho: pGAL1-10:ObGES, ScERG20(WW); pGAL1:ScERG20(WW); URA3 |
| ScC03 | ihol1: pGAL1-10:RsNEPS, Nc8HGO; pGAL7:NmISY; pGAL1-10:Cc8HGO, NcNOR |
| | Δprb1: ADE1; pGAL7:NmG8H; pGAL1-10:CrCYB5, CrCPR |
| | Δho: pGAL1-10:ObGES, ScERG20(WW); pGAL1-10:ScERG20(WW), ObGES; URA3 |

[0261] Table 11 shows the gene names and their corresponding source organisms that were introduced into the engineered strains.

TABLE 11

| | | SEQ ID |
|---|---|---|
| gene name | source organism | NO. |
| ScERG20(WW) | Saccharomyces cerevisiae | 789 |
| ObGES | Ocimurn basilicum | 930 |
| NmG8H | Nepeta mussinn | 1054 |
| CrCPR | Catharanthus roseus | 1075 |
| CrCYB5 | Catharanthus roseus | 1114 |
| Nc8HGO | Nepeta cataria | 1120 |
| Cc8HGO | Coffea canephora | 1128 |
| NmISY | Nepeta mussinii | 1163 |
| RsNEPS | Rauvolfia serpentina | 1511 |
| NcNOR | Nepeta cataria | 1393 |

[0262] All engineered strains in FIG. 6 produced nepetalactone and nepetalactol with an 8-hydroxygeraniol feed with maximum titers of 66.7 mg/L nepetalactone and 44.4 mg/L nepetalactol. Under identical conditions, no nepetalactone and nepetalactol was observed in the non-inoculated control wells and the wild-type strain. Only some of the engineered strains produced the same products with a geraniol substrate feed; generally, the titers were lower with a geraniol substrate feed with maximum titers of 6.1 mg/L nepetalactone and 10.6 mg/L nepetalactol. With the geraniol substrate feed, no nepetalactone and nepetalactol was observed in wells that were noninoculated or that contained the wild-type strain. Only the cis, trans-nepetalactone isomer was produced.

### Example 9—Construction of a Complete Nepetalactone Biosynthetic Pathway in Yeast to Enable Production from Glucose

[0263] Strains were designed with the intent of producing nepetalactone from glucose as the primary carbon source. This was achieved by the overexpression of the native mevalonate pathway in addition to the biosynthetic genes required to convert IPP and DMAPP into nepetalactone.

[0264] The below strains were generated using the methods described above in Example 8. Briefly, DNA was designed as multiple pieces with overlaps for homologous recombination. Homology arms of length 250-500 bp were designed to target the DNA for insertion into the genome by double crossover homologous recombination. In some cases, integration results in deletion of a locus, and in other cases, integration occurs in an intergenic region. Transformations were plated on selection media depending on the marker that was used. Colonies were cultured in selection media and were screened by diagnostic PCR to verify successful integration.

[0265] For construction of Strain X1, DNA that was designed for the heterologous expression of ERG10, ERG13, tHMGR, ERG12, ERG8 and ERG19 at the TRP1 locus with KlURA3 as the selection marker was integrated into wild-type CEN.PK113-7D with the native URA3 cassette deleted. The KIURA3 cassette was flanked by direct repeats to enable counter-selection in the presence of 5-FOA. The integration deletes TRP1, enabling its use as a marker for the subsequent transformation.

[0266] For construction of Strain X2, DNA that was designed for the heterologous expression of ObGES, AgGPPS, tHMGR, ERG20(WW) and IDI1 at the LEU2 locus with CgTRP1 as the selection marker was integrated into Strain X1. The integration deletes LEU2, enabling its use as a marker for the subsequent transformation. ObGES and AgGPPS were fused to an N-terminal GB1 tag.

[0267] For construction of Strain X3, DNA that was designed for the heterologous expression of CrCPR, VaG8H, NmISY, CrG8H, AtCPR, and Cr8HGO at the OYE2 locus with CgLEU2 as the selection marker was transformed into Strain X2. NmISY and Cr8HGO were fused to a GB1 tag.

[0268] For construction of Strain X4, DNA that was designed for the heterologous expression of Ncat_NOR_34 at the OYE3 locus with KanMX as the selection marker was transformed into Strain X3. Ncat_NOR_34 was fused to a GB1 tag. The KlURA3 cassette integrated at the TRP1 locus was removed by counter-selection on 5-FOA to generate Strain X4 Δura3.

[0269] For construction of Strain X5, DNA that was designed for knockout of GAL1 with KIURA3 as the selection marker was transformed into Strain X4 Δura3. The KIURA3 cassette flanked by direct repeats and was removed by counter-selection on 5-FOA to generate Strain X5 Δura3.

[0270] For construction of Strain X6 (7000445150), DNA that was designed for the integration of NcNOR, Cl8HGO, OpISY, RsNEPS, and RsNEPS with KlURA3 as the selection marker was transformed into Strain X5 Δura3.

### Final Genotype of Strain X6 (7000445150):

[0271] Δtrp1: pGAL7-ERG10-tERG10, pGAL10-ERG13-tGAL10, pGAL1-tHMGR-tHMG1, scar, pGAL1-ERG12-tERG12, pGAL10-ERG8-tGAL10, pGAL7-ERG19-tERG19

[0272] Δleu2: pGAL10-GB1_ObGES-tLEU2, pGAL1-GB1_AgGPPS-tCYC1, CgTRP1, pGAL1-tHMGR-tHMG1, pGAL1-ERG20(WW)-tGAL10, pGAL7-IDI1-tiDI1

[0273] Δoye2: pGAL7-CrCPR-tSPO1, pGAL10-VaG8H-tGAL10, pGAL1-GB1_NmISY-tAIP, CgLEU2, pGAL1-CrG8H1-tTIP1, pGAL10-AtCPR-tGAL10, pGAL7-GB1_Cr8HGO-tTPS1

[0274] Δoye3: pGAL1-NOR_Ncat_34-tGRE3, KanMX

[0275] Δgal1: scar

[0276] Δadh6: pGAL10-NcNOR-tSPO1, pGAL1-Cl8HGO-tPHO5, KlURA3, pGAL7-OpISY-tPGK1, pGAL1-RsNEPS1-tCYC1, pGAL10-RsNEPS2-tADH1

TABLE 12

| | SEQ ID |
|---|---|
| gene name | NO. |
| ERG10 | 1826 |
| ERG13 | 1827 |
| tHMGR | 1828 |
| ERG12 | 1829 |
| ERG8 | 1830 |
| ERG19 | 1831 |
| GB1_ObGES | 1832 |
| GB1_AgGPPS | 1833 |
| ERG20(WW) | 1834 |
| IDI1 | 1835 |
| CrCPR | 1836 |
| VaG8H | 1837 |
| GB1_NmISY | 1838 |
| CrG8H1 | 1839 |
| AtCPR | 1840 |
| GB1_Cr8HGO | 1841 |
| GB1_NOR_Ncat_34 | 1842 |
| NcNOR | 1393 |
| Cl8HGO | 1126 |
| OpISY | 1175 |
| RsNEPS1 | 1515 |
| RsNEPS2 | 1511 |

### Example 10—Construction of an Improved Nepetalactone-Producing Strain by Targeted Engineering of the P450 Step

[0277] Improved nepetalactone-producing strains were generated by focused engineering of the cytochrome P450 complex. This engineering was intended to shift the distribution of geraniol-derived products, specifically from geranic acid to nepetalactol and nepetalactone.

[0278] For construction of Strain X7, DNA that was designed for the knockout of the KanMX marker by insertion of the KIURA3 cassette was transformed into Strain X5. The KIURA3 cassette was flanked by direct repeats, and was removed by counter-selection in the presence of 5-FOA to generate Strain X7 Δura3.

[0279] For construction of Strain X8, DNA that was designed for the heterologous expression of NcNOR, Cc8HGO, NmISY, Nc8HGO, RsNEPS2 with KlURA3 as the selection marker was transformed into Strain X7 Δura3.

[0280] For construction of Strain X9, DNA that was designed for the knock-out of KIURA3 with the KanMX marker as the selection marker was transformed into Strain X8.

[0281] For construction of Strain X10A (7000552966), DNA that was designed for the heterologous expression of NcG8H-CrCPR fusion, NcG8H, AtCPR, and AtCYBR with KlURA3 as the selection marker was transformed into Strain X9. For construction of Strain X10B (7000553262), DNA that was designed for the heterologous expression of CrG8H, NcG8H, CaCPR, CrCYB5, and NcCYBR with KIURA3 as the selection marker was transformed into Strain X9.

### Final Genotype of Strain X10A:

[0282] Δtrp1: pGAL7-ERG10-tERG10, pGAL10-ERG13-tGAL10, pGAL1-tHMGR-tHMG1, scar, pGAL1-ERG12-tERG12, pGAL10-ERG8-tGAL10, pGAL7-ERG19-tERG19

[0283] Δleu2: pGAL10-GB1_ObGES-tLEU2, pGAL1-GB1_AgGPPS-tCYC1, CgTRP1, pGAL1-tHMGR-tHMG1, pGAL1-ERG20(WW)-tGAL10, pGAL7-IDI1-tIDI1,

[0284] Δoye2: pGAL7-CrCPR-tSPO1, pGAL10-VaG8H-tGAL10, pGAL1-GB1_NmISY-tAIP, CgLEU2, pGAL1-CrG8H1-tTIP1, pGAL10-AtCPR-tGAL10, pGAL7-GB1_Cr8HGO-tTPS1

[0285] Δoye3: pGAL1-NOR_Ncat_34-tGRE3, scar

[0286] Δgal1: scar

[0287] Δadh6: pGAL10-NcNOR-tSPO1, pGAL1-Cc8HGO-tPHO5, KanMX, pGAL7-NmISY-tPGK1, pGAL1-Nc8HGO-tCYC1, pGAL10-RsNEPS2-tADH1

[0288] iMGA1: pGAL1-NcG8H_CrCPR-tADH1, pGAL10-NcG8H-tCYC1, pGAL3-AtCPR-tPGK1, KlURA3, pYEF3-AtCYBR-tSPO1

[0289] Final genotype of Strain X10B (7000553262) is identical to Strain X10A (7000552966) except for the following integration at iMGA1:

[0290] iMGA1: pGAL1-CrG8H2-tADH1, pGAL10-NcG8H-tCYC1, pGAL3-CaCPR-tPGK1, KlURA3, pPGK1-CrCYB5-tPHO5, pYEF3-NcCYBR-tSPO1

TABLE 13
Additional genes:

| | Nucleic | Amino |
|---|---|---|
| | acid SEQ | acid SEQ |
| gene name | ID NO. | ID NO. |
| Cc8HGO | 1128 | 340 |
| NmISY | 1163 | 375 |
| Nc8HGO | 1120 | 332 |
| RsNEPS2 | 1511 | 723 |
| NcG8H_CrCPR | 1421 | 633 |
| NcG8H | 1056 | 268 |
| AtCPR | 1078 | 290 |
| AtCYBR | 1573 | 785 |
| CrG8H2 | 1843 | 1825 |
| CaCPR | 1087 | 299 |
| CrCYB5 | 1114 | 326 |
| NcCYBR | 1572 | 784 |

### Example 11—Cloning and Expression of Dihydronepetalactone Dehydrogenases Capable of Converting Nepetalactone to Dihydronepetalactone (Prophetic)

[0291] Knockout libraries and overexpression libraries will be used to test whether there is a native enzyme that has the activity to convert nepetalactone to dihydronepetalactone in microbes, such as S. cereivisae. Another approach to identify dihydronepetalactone dehydrogenases involves identifying proteins predicted to be DND enzymes using BLAST. A MUSCLE protein alignment is performed with all the relevant DND sequences. HMMER was used to functionally annotate all predicted peptides based on their best matching Pfam hidden markov model (HMM) by E-value. All HMMs related to oxidoreductase activity were investigated further by BLAST and filtered to remove sequences with high sequence identity to any sequences from the non-redundant database to further narrow the list of candidates. The sequences of these candidates were codon-optimized for expression in S. cerevisiae and/or E. coli and were synthesized by a third party and cloned into an expression vector for characterization. The proteins predicted as being DND enzymes are tested for DND enzymatic activity of converting a nepetalactone substrate to dihydronepetalactone.

### Example 12—Control of Biosynthetic Pathway Expression by Various Repressors/Inducers in Saccharomyces cerevisiae (Prophetic)

[0292] To control expression of pathway genes, native and non-native promoters regulated by a repressor and/or inducer are used on a gene(s) within the pathway. In some cases regulated promoters are modified to use less or different repressors and/or inducers that are economical at scale. S. cerevisiae was engineered to contain the promoter and required regulatory genes to ensure tight controllable expression and therefore production of nepetalactol and/or its derivatives.

[0293] We find that due to the toxicity of intermediates, byproducts, and products of the downstream pathway, expression of a gene or multiple genes, controlled expression of a selected gene(s) by various repressors and/or inducers allows us to build up cell mass prior to production of toxic material and then express the required genes producing our desired toxic product at higher titers.

### Example 13—Gene Up- or Down-Regulation to Increase Production of Geraniol-Derived Terpenoids

[0294] We found that upregulation, downregulation, or knock-out of specific genes, such as genes encoding oxidoreductases, within the host organism reduced byproduct accumulation (for example, geranic acid) or increased production of nepetalactol or nepetalactone. FIG. 12A shows the titers of geranic acid, nepetalactol and nepetalactone, and the combined titer of nepetalactol and nepetalactone in exemplary engineered strains compared to their parent strain, labeled as Parent. A complete gene deletion of FMS1 and SUR2 independently improved titers of nepetalactol over the parent strain. Deletion of FMS1 also improved nepetalactone titers over the parent strain. An insertion of the TDH3 promoter sequence between SWT21 and its native promoter reduced the levels of the by-product, geranic acid and increased nepetalactol titer compared to the parent strain, but decreased nepetalactone titer compared to the parent strain. An insertion of the YEF3 promoter sequence between QCR9 and its native promoter noticeably improved nepetalactol levels compared to the parent strain.

[0295] FIG. 12B shows the titers of geranic acid, nepetalactol and nepetalactone, and the combined titer of nepetalactol and nepetalactone in exemplary engineered strains compared to their parent strain, labeled as Parent. Note that the parent strain here is different from that shown in FIG. 12A. The insertion of a gene cassette containing the GAL7 promoter driving the expression of NCP1 at a neutral locus such as in intergenic region between HOL1 and a proximal gene, resulted in reduced geranic acid levels, and increased nepetalactol levels compared to the parent strain. The insertion of a gene cassette containing the GAL7 promoter driving the expression of GPD1 at the same neutral locus resulted in reduced geranic acid levels, but also had a negative effect on nepetalactol titers compared to the control.

[0296] The nucleic acid sequences of the genes, constructs and promoters used in these experiments are listed below in Table 14.

TABLE 14

| | SEQ ID |
|---|---|
| Sequence name | NO: |
| FMS1 | 1844 |
| SUR2 | 1845 |
| pTDH3 | 1846 |
| SWT21 | 1847 |
| pYEF3 | 1848 |
| QCR9 | 1849 |
| pGAL7 | 1850 |
| NCP1 | 1851 |
| GPD1 | 1852 |
| construct 1/2 for ihol1: pGAL7 < NCP1; | 1853 |
| plasmid 1/2 for ihol1: pGAL7 < GPD1 | |
| construct for pYEF3 < QCR9 | 1854 |
| construct for dFMS1 | 1855 |
| construct for pTHD3 < QCR9 | 1856 |
| construct for dSUR2 | 1857 |
| construct 2/2 for ihol1: pGAL7 < NCP1 | 1858 |
| construct 2/2 for ihol1: pGAL7 < GPD1 | 1859 |

[0297] These results show that alteration of the levels of certain gene products, such as oxidoreductases, can affect the levels of metabolites, such as nepetalactol and nepetalactone, produced. Therefore, modulation of oxidoreductases can result in the generation of microbial cells disclosed herein, which are capable of producing high yields of nepetalactol, nepetalactone and dihydronepetalactone.

[0298] Other genes in the host organism will similarly be upregulated or downregulated to test the effect on the production of geraniol, nepetalactol or nepetalactone. Potential target genes include, but are not limited to, the genes listed in Table 7. Upregulation or downregulation will be done by replacing the native promoter of the gene with one that is stronger or weaker, respectively. Modulation of gene expression will also be achieved by insertion of a terminator sequence followed by a stronger or weaker promoter in between the target gene and native promoter. For down-regulation, activity will be completely abolished by knocking-out the gene either partially or entirely. These manipulations will be performed by standard molecular biology methods where DNA is designed for double-crossover homologous recombination with the added insertion of a KIURA3 cassette or other marker for selection.

### Example 14—Production and Extraction of Geraniol-Derived Terpenoids Using Bi-Phasic Fermentation

[0299] Strains 7000445150 (see Example 9) and strains 7000552966 & 7000553262 (see Example 10) were grown using the biphasic fermentation process disclosed herein. Briefly, the fermentation conditions comprised of a temperature of 30 degrees C., pH of 5.0, dissolved oxygen of 30-50%, with a 10% methyl oleate as overlay and a glucose-limited fed-batch phase.

[0300] The first strain, 7000445150, accumulates >1.5 g/L of geranic acid, >0.5 g/L nepetalactone, and <0.1 g/L nepetalactol. After a subsequent round of engineering, the two additional strains, 7000552966 & 7000553262, show <0.25 g/L of geranic acid, and >1 g/L of both nepetalactol and nepetalactone. FIG. 12 shows a distribution of three geraniol-derived terpenoids, geranic acid, nepetalactol, and nepetalactone produced by these strains.

### Further Embodiments

[0301] Further embodiments contemplated by the disclosure are listed below:

[0302] Embodiment 1: A recombinant microbial cell capable of producing nepetalactol from a sugar substrate without additional precursor supplementation.

[0303] Embodiment 1.1: The recombinant microbial cell of embodiment 1, wherein the sugar substrate is selected from the group consisting of glucose, sucrose, maltose, and lactose.

[0304] Embodiment 1.2: The recombinant microbial cell of embodiment 1.1, wherein the sugar substrate is glucose.

[0305] Embodiment 2: The recombinant microbial cell of any one of the embodiments 1-1.2, wherein the recombinant microbial cell is capable of producing industrially relevant quantities of nepetalactol of greater than 1 gram per liter.

[0306] Embodiment 3: The recombinant microbial cell of any one of the embodiments 1-2, wherein the recombinant microbial cell comprises one or more polynucleotide(s) encoding each of the following heterologous enzymes: a geraniol diphosphate synthase (GPPS), a geranyl diphosphate diphosphatase (geraniol synthase, GES), a geraniol 8-hydroxylase (G8H), a cytochrome P450 reductase (CPR) capable of promoting regeneration of the redox state of the G8H, a cytochrome B5 (CYTB5) capable of promoting regeneration of the redox state of the G8H, an 8-hydroxygeraniol dehydrogenase (8HGO), an iridoid synthase (ISY), and a nepetalactol synthase (NEPS).

[0307] Embodiment 4: The recombinant microbial cell of embodiment 3, wherein the recombinant microbial cell is engineered to overexpress one or more enzymes from the mevalonate pathway selected from the group consisting of; acetyl-coA acetyltransferase (ERG10), hydroxymethylglutaryl-coA synthase (ERG13), HMG-CoA reductase (tHMG), mevalonate kinase (ERG12), phosphomevalonate kinase (ERG8), mevalonate decarboxylase (ERG19), and IPP isomerase (IDI).

[0308] Embodiment 4.1: The recombinant microbial cell of embodiment 4, wherein the tHMG is truncated to lack the membrane-binding region.

[0309] Embodiment 5: The recombinant microbial cell of embodiments 3-4.1, wherein the recombinant microbial cell is capable of producing industrially relevant quantities of nepetalactone of greater than 1 gram per liter, and wherein the recombinant microbial cell comprises a polynucleotide encoding for a nepetalactol oxidoreductase (NOR) heterologous enzyme.

[0310] Embodiment 6: The recombinant microbial cell of embodiments 3 or 4.1, wherein the recombinant microbial cell is capable of producing industrially relevant quantities of dihydronepetalactone of greater than 1 gram per liter, and wherein the recombinant microbial cell comprises one or more polynucleotides encoding each of the following heterologous enzymes: a nepetalactol oxidoreductase (NOR), and a dihydronepetalactone dehydrogenase (DND) capable of converting nepetalactone to dihydronepetalactone.

[0311] Embodiment 7: The recombinant microbial cell of any one of embodiments 3-6, wherein the polynucleotides encoding for heterologous enzymes are codon optimized for expression in the recombinant microbial cell.

[0312] Embodiment 8: The recombinant microbial cell of any one of embodiments 3-7, wherein the recombinant microbial cell is from a genus selected from the group consisting of: Agrobacterium, Alicyclobacillus, Anabaena, Anacystis, Acinetobacter, Acidothermus, Arthrobacter, Azobacter, Bacillus, Bifidobacterium, Brevibacterium, Butyrivibrio, Buchnera, Campestris, Camplyobacter, Clostridium, Corynebacterium, Chromatium, Coprococcus, Escherichia, Enterococcus, Enterobacter, Erwinia, Fusobacterium, Faecalibacterium, Francisella, Flavobacterium, Geobacillus, Haemophilus, Helicobacter, Klebsiella, Lactobacillus, Lactococcus, Ilyobacter, Micrococcus, Microbacterium, Mesorhizobium, Methylobacterium, Methylobacterium, Mycobacterium, Neisseria, Pantoea, Pseudomonas, Prochlorococcus, Rhodobacter, Rhodopseudomonas, Rhodopseudomonas, Roseburia, Rhodospirillum, Rhodococcus, Scenedesmus, Streptomyces, Streptococcus, Synecoccus, Saccharomyces, Saccharomonospora, Staphylococcus, Serratia, Salmonella, Shigella, Thermoanaerobacterium, Tropheryma, Tularensis, Temecula, Thermosynechococcus, Thermococcus, Ureaplasma, Xanthomonas, Xylella, Yersinia, and Zymomonas.

[0313] Embodiment 9: The recombinant microbial cell of any one of embodiments 1-7, wherein the recombinant microbial cell is Saccharomyces cerevisiae.

[0314] Embodiment 10: The recombinant microbial cell of any one of embodiments 1-7, wherein the recombinant microbial cell is Escherichia coli.

[0315] Embodiment 11: A method for the production of nepetalactol from a sugar substrate, said method comprising: (a) providing a recombinant microbial cell according to any one of embodiments 1-10; and (b) cultivating the recombinant microbial cell in a suitable cultivation medium comprising the sugar substrate, thereby producing nepetalactol.

[0316] Embodiment 11.1: The method of embodiment 11, wherein the sugar substrate is selected from the group consisting of glucose, sucrose, maltose, and lactose.

[0317] Embodiment 11.2: The method of embodiment 11.1, wherein the sugar substrate is glucose.

[0318] Embodiment 12: A method for the production of nepetalactone from a sugar substrate, said method comprising: (a) providing a recombinant microbial cell according to any one of embodiments 5-10; and (b) cultivating the recombinant microbial cell in a suitable cultivation medium comprising the sugar substrate, thereby producing nepetalactone.

[0319] Embodiment 12.1: The method of embodiment 12, wherein the sugar substrate is selected from the group consisting of glucose, sucrose, maltose, and lactose.

[0320] Embodiment 12.2: The method of embodiment 12.1, wherein the sugar substrate is glucose.

[0321] Embodiment 13: A method for the production of dihydronepetalactone from a sugar substrate, said method comprising: (a) providing a recombinant microbial cell according to any one of embodiments 6-10; and (b) cultivating the recombinant microbial cell in a suitable cultivation medium comprising the sugar substrate, thereby producing dihydronepetalactone.

[0322] Embodiment 13.1: The method of claim 13, wherein the sugar substrate is selected from the group consisting of glucose, sucrose, maltose, and lactose.

[0323] Embodiment 13.2: The method of claim 13.1, wherein the sugar substrate is glucose.

[0324] Embodiment 14: A recombinant microbial cell capable of producing nepetalactone, wherein said recombinant microbial cell comprises a nucleic acid encoding for a heterologous nepetalactol oxidoreductase (NOR) enzyme that catalyzes the reduction of nepetalactol to nepetalactone.

[0325] Embodiment 14.1: The recombinant microbial cell of embodiment 14, wherein the NOR enzyme is also capable of catalyzing the cyclization of an enol intermediate to nepetalactol.

[0326] Embodiment 15: The recombinant microbial cell of embodiment 14 or 14.1, wherein the recombinant microbial cell is capable of producing industrially relevant quantities of nepetalactone of greater than 1 gram per liter.

[0327] Embodiment 16: The recombinant microbial cell of any one of embodiments 14-15, wherein the recombinant microbial cell comprises one or more polynucleotide(s) encoding one or more heterologous enzymes selected from the group consisting of: a geraniol diphosphate synthase (GPPS), a geranyl diphosphate diphosphatase (geraniol synthase, GES), a geraniol 8-hydroxylase (G8H), a cytochrome P450 reductase (CPR) capable of promoting regeneration of the redox state of the G8H, a cytochrome B5 (CYTB5) capable of promoting regeneration of the redox state of the G8H, an 8-hydroxygeraniol dehydrogenase (8HGO), an iridoid synthase (ISY), and a nepetalactol synthase (NEPS).

[0328] Embodiment 16.1: The recombinant microbial cell of any one of embodiments 14-15, wherein the recombinant microbial cell comprises a polynucleotide encoding a heterologous geraniol diphosphate synthase (GPPS).

[0329] Embodiment 16.2: The recombinant microbial cell of any one of embodiments 14-15, wherein the recombinant microbial cell comprises a polynucleotide encoding a heterologous geranyl diphosphate diphosphatase (geraniol synthase, GES).

[0330] Embodiment 16.3: The recombinant microbial cell of any one of embodiments 14-15, wherein the recombinant microbial cell comprises a polynucleotide encoding a heterologous geraniol 8-hydroxylase (G8H).

[0331] Embodiment 16.4: The recombinant microbial cell of any one of embodiments 14-15, wherein the recombinant microbial cell comprises a polynucleotide encoding a heterologous cytochrome P450 reductase (CPR) capable of promoting regeneration of the redox state of geraniol 8-hydroxylase.

[0332] Embodiment 16.5: The recombinant microbial cell of any one of embodiments 14-15, wherein the recombinant microbial cell comprises a polynucleotide encoding a heterologous cytochrome B5 (CYTB5) capable of promoting regeneration of the redox state of geraniol 8-hydroxylase.

[0333] Embodiment 16.6: The recombinant microbial cell of any one of embodiments 14-15, wherein the recombinant microbial cell comprises a polynucleotide encoding a heterologous 8-hydroxygeraniol dehydrogenase (8HGO).

[0334] Embodiment 16.7: The recombinant microbial cell of any one of embodiments 14-15, wherein the recombinant microbial cell comprises a polynucleotide encoding a heterologous iridoid synthase (ISY).

[0335] Embodiment 16.8: The recombinant microbial cell of any one of embodiments 14-15, wherein the recombinant microbial cell comprises a polynucleotide encoding a heterologous nepetalactol synthase (NEPS).

[0336] Embodiment 17: The recombinant microbial cell of any one of embodiments 14-16.8, wherein the recombinant microbial cell is engineered to overexpress one or more enzymes from the mevalonate pathway selected from the group consisting of: acetyl-coA acetyltransferase (ERG10), hydroxymethylglutaryl-coA synthase (ERG13), HMG-CoA reductase (tHMG), mevalonate kinase (ERG12), phosphomevalonate kinase (ERG8), mevalonate decarboxylase (ERG19), and IPP isomerase (IDI).

[0337] Embodiment 17.1: The recombinant microbial cell of any one of embodiments 14-16.8, wherein the recombinant microbial cell is engineered to overexpress acetyl-coA acetyltransferase (ERG10).

[0338] Embodiment 17.2: The recombinant microbial cell of any one of embodiments 14-16.8, wherein the recombinant microbial cell is engineered to overexpress hydroxymethylglutaryl-coA synthase (ERG13).

[0339] Embodiment 17.3: The recombinant microbial cell of any one of embodiments 14-16.8, wherein the recombinant microbial cell is engineered to overexpress HMG-CoA reductase (tHMG).

[0340] Embodiment 17.4: The recombinant microbial cell of embodiment 17.3, wherein the tHMG is truncated to lack the membrane-binding region.

[0341] Embodiment 17.5: The recombinant microbial cell of any one of embodiments 14-16.8, wherein the recombinant microbial cell is engineered to overexpress mevalonate kinase (ERG12).

[0342] Embodiment 17.6: The recombinant microbial cell of any one of embodiments 14-16.8, wherein the recombinant microbial cell is engineered to overexpress phosphomevalonate kinase (ERG8)

[0343] Embodiment 17.7: The recombinant microbial cell of any one of embodiments 14-16.8, wherein the recombinant microbial cell is engineered to overexpress mevalonate decarboxylase (ERG19).

[0344] Embodiment 17.8: The recombinant microbial cell of any one of embodiments 14-16.8, wherein the recombinant microbial cell is engineered to overexpress IPP isomerase (IDI).

[0345] Embodiment 18: A method for the production of nepetalactone, said method comprising: (a) providing a recombinant microbial cell according to any one of embodiments 14-17.8: (b) cultivating the recombinant microbial cell in a suitable cultivation medium; and (c) contacting the recombinant microbial cell with nepetalactol substrate to form nepetalactone.

[0346] Embodiment 19: A recombinant microbial cell capable of producing dihydronepetalactone, wherein said recombinant microbial cell comprises a nucleic acid encoding for a heterologous dihydronepetalactone dehydrogenase (DND) enzyme capable of converting nepetalactone to dihydronepetalactone.

[0347] Embodiment 20: The recombinant microbial cell of embodiment 19, wherein the recombinant microbial cell is capable of producing industrially relevant quantities of dihydronepetalactone of greater than 1 gram per liter.

[0348] Embodiment 21: The recombinant microbial cell of embodiment 19 or 20, wherein the recombinant microbial cell comprises one or more polynucleotide(s) encoding one or more heterologous enzymes selected from the group consisting of: a geraniol diphosphate synthase (GPPS), a geranyl diphosphate diphosphatase (geraniol synthase, GES), a geraniol 8-hydroxylase (G8H), a cytochrome P450 reductase (CPR) capable of promoting regeneration of the redox state of the G8H, a cytochrome B5 (CYTB5) capable of promoting regeneration of the redox state of the G8H, an 8-hydroxygeraniol dehydrogenase (8HGO), an iridoid synthase (ISY), a nepetalactol synthase (NEPS), and nepetalactol oxidoreductase (NOR).

[0349] Embodiment 21.1: The recombinant microbial cell of any one of embodiments 19-21, wherein the recombinant microbial cell comprises a polynucleotide encoding a heterologous geraniol diphosphate synthase (GPPS).

[0350] Embodiment 21.2: The recombinant microbial cell of any one of embodiments 19-21, wherein the recombinant microbial cell comprises a polynucleotide encoding a heterologous geranyl diphosphate diphosphatase (geraniol synthase, GES).

[0351] Embodiment 21.3: The recombinant microbial cell of any one of embodiments 19-21, wherein the recombinant microbial cell comprises a polynucleotide encoding a heterologous geraniol 8-hydroxylase (G8H).

[0352] Embodiment 21.4: The recombinant microbial cell of any one of embodiments 19-21, wherein the recombinant microbial cell comprises a polynucleotide encoding a heterologous cytochrome P450 reductase (CPR) capable of promoting regeneration of the redox state of geraniol 8-hydroxylase.

[0353] Embodiment 21.5: The recombinant microbial cell of any one of embodiments 19-21, wherein the recombinant microbial cell comprises a polynucleotide encoding a heterologous cytochrome B5 (CYTB5) capable of promoting regeneration of the redox state of geraniol 8-hydroxylase.

[0354] Embodiment 21.6: The recombinant microbial cell of any one of embodiments 19-21, wherein the recombinant microbial cell comprises a polynucleotide encoding a heterologous 8-hydroxygeraniol dehydrogenase (8HGO).

[0355] Embodiment 21.7: The recombinant microbial cell of any one of embodiments 19-21, wherein the recombinant microbial cell comprises a polynucleotide encoding a heterologous iridoid synthase (ISY).

[0356] Embodiment 21.8: The recombinant microbial cell of any one of embodiments 19-21, wherein the recombinant microbial cell comprises a polynucleotide encoding a heterologous nepetalactol synthase (NEPS).

[0357] Embodiment 21.9: The recombinant microbial cell of any one of embodiments 19-21, wherein the recombinant microbial cell comprises a polynucleotide encoding a heterologous nepetalactol oxidoreductase (NOR).

[0358] Embodiment 22: The recombinant microbial cell of any one of embodiments 19-21.9, wherein the recombinant microbial cell is engineered to overexpress one or more enzymes from the mevalonate pathway selected from the group consisting of; acetyl-coA acetyltransferase (ERG10), hydroxymethylglutaryl-coA synthase (ERG13), HMG-CoA reductase (tHMG), mevalonate kinase (ERG12), phosphomevalonate kinase (ERG8), mevalonate decarboxylase (ERG19), and IPP isomerase (IDI).

[0359] Embodiment 22.1: The recombinant microbial cell of any one of embodiments 19-22, wherein the recombinant microbial cell is engineered to overexpress acetyl-coA acetyltransferase (ERG10).

[0360] Embodiment 22.2: The recombinant microbial cell of any one of embodiments 19-22, wherein the recombinant microbial cell is engineered to overexpress hydroxymethylglutaryl-coA synthase (ERG13).

[0361] Embodiment 22.3: The recombinant microbial cell of any one of embodiments 19-22, wherein the recombinant microbial cell is engineered to overexpress HMG-CoA reductase (tHMG).

[0362] Embodiment 22.4: The recombinant microbial cell of embodiment 22.3, wherein the tHMG is truncated to lack the membrane-binding region.

[0363] Embodiment 22.5: The recombinant microbial cell of any one of embodiments 19-22, wherein the recombinant microbial cell is engineered to overexpress mevalonate kinase (ERG12).

[0364] Embodiment 22.6: The recombinant microbial cell of any one of embodiments 19-22, wherein the recombinant microbial cell is engineered to overexpress phosphomevalonate kinase (ERG8).

[0365] Embodiment 22.7: The recombinant microbial cell of any one of embodiments 19-22, wherein the recombinant microbial cell is engineered to overexpress mevalonate decarboxylase (ERG19).

[0366] Embodiment 22.8: The recombinant microbial cell of any one of embodiments 19-22, wherein the recombinant microbial cell is engineered to overexpress IPP isomerase (IDI).

[0367] Embodiment 23: A method for the production of dihydronepetalactone, said method comprising: (a) providing a recombinant microbial cell according to any one of embodiments 19-22.8; (b) cultivating the recombinant microbial cell in a suitable cultivation medium; and (c) contacting the recombinant microbial cell with nepetalactone substrate to form dihydronepetalactone.

[0368] Embodiment 24: A bioreactor for producing a desired product selected from the group consisting of nepetalactol, nepetalactone, and dihydronepetalactone, said bioreactor containing a composition comprising a first phase and a second phase, wherein the first phase is an aqueous phase comprising a microbial cell capable of synthesizing the product, and wherein the second phase comprises an organic solvent and at least a portion of the desired product synthesized by the microbial cell.

[0369] Embodiment 25: The bioreactor of embodiment 24, wherein the microbial cell is the recombinant microbial cell of any one of embodiments 1-10, 14-17.8, or 19-22.8.

[0370] Embodiment 26: The bioreactor of embodiment 24 or 25, wherein the organic solvent is selected from the group consisting of: corn oil, dodecane, hexadecane, oleyl alcohol, butyl oleate, dibutyl phthalate, dodecanol, dioctyl phthalate, farnesene, methyl oleate and isopropyl myristate.

[0371] Embodiment 27: The bioreactor of embodiment 24 or 25, wherein the organic solvent comprises one or more of olive oil, sesame oil, castor oil, cotton-seed oil, soybean oil, butane, pentane, heptane, octane, isooctane, nonane, decane, methyl oleate and terpene.

[0372] Embodiment 27.1 The bioreactor of embodiment 24 or 25, wherein the organic solvent is a polymer.

[0373] Embodiment 27.2 The bioreactor of embodiment 27.1, wherein the polymer is selected from the group consisting of PolyTHF, Hytrel, PT-series, and Pebax.

[0374] Embodiment 27.3: The bioreactor of embodiment 24 or 25, wherein the organic solvent comprises a polymer.

[0375] Embodiment 28: The bioreactor of any one of embodiments 25-27, wherein said bioreactor comprises a control mechanism configured to control at least one or more of pH, solvent, temperature, and dissolved oxygen.

[0376] Embodiment 29: A method for producing a desired product selected from the group consisting of nepetalactol, nepetalactone, and dihydronepetalactone, said method comprising the steps of: a) growing an aqueous culture of microbial cells configured to produce the desired product in response to a chemical inducer, in the absence of the chemical inducer; b) contacting the microbial cells with the chemical inducer; and c) adding an organic solvent to the induced aqueous culture, said organic solvent having low solubility with the aqueous culture, wherein product secreted by the microbial cells accumulates in the organic solvent, thereby reducing contact of the product with the microbial cells.

[0377] Embodiment 30: The method of embodiment 29, wherein the microbial cells comprise the recombinant microbial cell of any one of embodiments 1-10, 14-17.8, or 19-22.8.

[0378] Embodiment 31: The method of embodiment 29 or 30, wherein the organic solvent is selected from the group consisting of: corn oil, dodecane, hexadecane, oleyl alcohol, butyl oleate, dibutyl phthalate, dodecanol, dioctyl phthalate, farnesene, and isopropyl myristate.

[0379] Embodiment 32: The method of any one of embodiments 29-31, wherein the organic solvent comprises one or more of olive oil, sesame oil, castor oil, cotton-seed oil, soybean oil, butane, pentane, heptane, octane, isooctane, nonane, decane, and terpene.

[0380] Embodiment 32.1 The method of embodiment 29 or 30, wherein the organic solvent is a polymer.

[0381] Embodiment 32.2 The method of embodiment 32.1, wherein the polymer is selected from the group consisting of PolyTHF, Hytrel, PT-series, and Pebax.

[0382] Embodiment 32.3: The bioreactor of embodiment 29 or 30, wherein the organic solvent comprises a polymer.

[0383] Embodiment 33: The method of any one of embodiments 29-32, wherein the culture is a fed-batch culture.

[0384] Embodiment 34: The method of embodiment 33, wherein the organic solvent is added as part of a fed batch portion.

[0385] Embodiment 35: The method of any one of embodiments 29-34, comprising the step of: d) removing at least a portion of the organic solvent from the culture, thereby harvesting the desired product.

### Additional Embodiments

[0386] 1. A recombinant microbial cell capable of producing nepetalactol from a microbial feedstock without additional nepetalactol precursor supplementation.
[0387] 2. The recombinant microbial cell of embodiment 1, wherein the microbial feedstock comprises an carbon source selected from the group consisting of glucose, sucrose, maltose, lactose, glycerol, and ethanol.
[0388] 3. The recombinant microbial cell of embodiment 2, wherein the carbon source is glucose.
[0389] 4. The recombinant microbial cell of any one of embodiments 1-3, wherein the recombinant microbial cell comprises a polynucleotide encoding for a heterologous nepetalactol synthase (NEPS) enzyme.
[0390] 5. The recombinant microbial cell of any one of embodiments 1-4, wherein the recombinant microbial cell comprises one or more polynucleotide(s) encoding each of the following heterologous enzymes: a geraniol diphosphate synthase (GPPS), a geranyl diphosphate diphosphatase (geraniol synthase, GES), a geraniol 8-hydroxylase (G8H), a cytochrome P450 reductase (CPR) capable of promoting regeneration of the redox state of the G8H, a cytochrome B5 (CYTB5) capable of promoting regeneration of the redox state of the G8H, an 8-hydroxygeraniol dehydrogenase (8HGO), an iridoid synthase (ISY), and a nepetalactol synthase (NEPS).
[0391] 6. The recombinant microbial cell of any one of embodiments 4-5, wherein the heterologous NEPS enzyme exhibits at least 90%, 95%, 97%, or 100% sequence identity with an amino acid sequence selected from the group consisting of SEQ ID Nos 730, 731, 732, 733, 734, 735, 736, 737, 738, 739, 740, 741, 742, 743, 744, 745, 746, 747, 748, 749, 750, 751, 752, 753, 754, 755, 756, 757, 758, 759, 760, 761, 762, 763, 764, 765, 766, 767, 768, 769, 770, 771, 772, 773, and 774.
[0392] 7. The recombinant microbial cell of any one of embodiments 4-6, wherein the heterologous NEPS enzyme exhibits at least 90%, 95%, 97%, or 100% sequence identity with an amino acid sequence selected from the group consisting of SEQ ID Nos SEQ ID Nos 730, 731, 732, and 733.
[0393] 8. The recombinant microbial cell of any one of embodiments 1-7, wherein the recombinant microbial cell is engineered to overexpress one or more enzymes from the mevalonate pathway selected from the group consisting of: acetyl-coA acetyltransferase (ERG10), hydroxymethylglutaryl-coA synthase (ERG13). HMG-CoA reductase (tHMG), mevalonate kinase (ERG12), phosphomevalonate kinase (ERG8), mevalonate decarboxylase (ERG19), and IPP isomerase (IDI).
[0394] 9. The recombinant microbial cell of embodiment 8, wherein the tHMG is truncated to lack the membrane-binding region.
[0395] 9.1 The recombinant microbial cell of any one of embodiments 1-9, wherein the recombinant microbial cell is capable of producing industrially relevant quantities of nepetalactol of greater than 400, 450, 500, 550, 600, 650, 700, 750, 800, 850, 900, 950, 1000, 1050, 1100, 1150, 1200, 1250, 1300, 1350, 1400, 1450, or 1500 micrograms of nepetalactol per liter of culture.
[0396] 10. The recombinant microbial cell of any one of embodiments 1-9.1, wherein the recombinant microbial cell comprises a polynucleotide encoding for a nepetalactol oxidoreductase (NOR) heterologous enzyme.
[0397] 11. The recombinant microbial cell of embodiment 10, wherein the recombinant microbial cell is capable of producing industrially relevant quantities of nepetalactone of greater than 400, 450, 500, 550, 600, 650, 700, 750, 800, 850, 900, 950, 1000, 1050, 1100, 1150, 1200, 1250, 1300, 1350, 1400, 1450, or 1500 micrograms of nepetalactone per liter of culture.
[0398] 12. The recombinant microbial cell of any one of embodiments 10-11, wherein the NOR enzyme exhibits at least 90%, 95%, 97%, or 100% sequence identity with an amino acid sequence selected from the group consisting of SEQ ID Nos 520-607, 775-782 and 1642-1644.
[0399] 13. The recombinant microbial cell of any one of embodiments 10-12, wherein the NOR enzyme exhibits at least 90%, 95%, 97%, or 100% sequence identity with of SEQ ID No 605.
[0400] 14. The recombinant microbial cell of any one of embodiments 1-13 wherein the recombinant microbial cell comprises one or more polynucleotides encoding each of the following heterologous enzymes: a nepetalactol oxidoreductase (NOR), and a dihydronepetalactone dehydrogenase (DND) capable of converting nepetalactone to dihydronepetalactone.
[0401] 15. The recombinant microbial cell of any one of embodiments 4-14, wherein the polynucleotides encoding for heterologous enzymes are codon optimized for expression in the recombinant microbial cell.
[0402] 16. The recombinant microbial cell of any one of embodiments 1-15, wherein the recombinant microbial cell is from a genus selected from the group consisting of: Agrobacterium, Alicyclobacillus, Anabaena, Anacystis, Acinetobacter, Acidothermus, Arthrobacter, Azobacter, Bacillus, Bifidobacterium, Brevibacterium, Butyrivibrio, Buchnera, Campestris, Camplyobacter, Clostridium, Corynebacterium, Chromatium, Coprococcus, Escherichia, Enterococcus, Enterobacter, Erwinia, Fusobacterium, Faecalibacterium, Francisella, Flavobacterium, Geobacillus, Haemophilus, Helicobacter, Klebsiella, Lactobacillus, Lactococcus, Ilyobacter, Micrococcus, Microbacterium, Mesorhizobium, Methylobacterium, Methylobacterium, Mycobacterium, Neisseria, Pantoea, Pseudomonas, Prochlorococcus, Rhodobacter, Rhodopseudomonas, Rhodopseudomonas, Roseburia, Rhodospirillum, Rhodococcus, Scenedesmus, Streptomyces, Streptococcus, Synecoccus, Saccharomyces, Saccharomonospora, Staphylococcus, Serratia, Salmonella, Shigella, Thermoanaerobacterium, Tropheryma, Tularensis, Temecula, Thermosynechococcus, Thermococcus, Ureaplasma, Xanthomonas, Xylella, Yersinia, and Zymomonas.
[0403] 17. The recombinant microbial cell of any one of embodiments 1-16, wherein the recombinant microbial cell is Saccharomyces cerevisiae.
[0404] 18. The recombinant microbial cell of any one of embodiments 1-17, wherein the recombinant microbial cell is Escherichia coli.
[0405] 19. The recombinant microbial cell of any one of embodiments 1-18, wherein the recombinant microbial cell expresses altered levels of an oxidoreductase, as compared to a wild type microbial cell.
[0406] 20. The recombinant microbial cell of embodiment 19, wherein the oxidoreductase is encoded by a gene selected from OYE2, OYE3, ADH3, ALD4, BDH2, PUT2, SOR2, ALD3, ALD5, HFD1, UGA2, ADH5, ALD6, SFA1, MSC7, AYR1, SPS19, ALD2, PRO2, SOR1, ADH2, ADH1, HIS4, ZTA1, ETR1, AST1, YIM1, AST2, SDH2, CIR2, ARG5,6, HOM2, TDH1, TDH2, TDH3, AAD15, CYB2, DUS1, DUS3, ENV9, EPS1, FET5, FMS1, FRE1, FRE2, FRE3, FRE7, FRE8, GDH2, GIS1, GPX1, GRX1, GRX5, HEM14, HYR1, JHD1, JHD2, KGD1, LYS1, LYS9, MET8, MIS1, MTD1, NDI1, PDX3, POX1, PRX1, RNR4, RPH1, SCO1, SHH4, SOD1, SOD2, TRX3, TSA2, URA1, YMR31, COX13, COX4, COX5A, COX6, COX7, COX8, COX9, GCV1, GCV2, GCV3, GDH1, GDH3, GLT1, NDE1, NDE2, PDA1, QCR2, QCR6, QCR7, QCR8, RNR1, SDH4, TRX2, TYR1, ADH6, BDH1, XYL2, CAT5, ERG3, ERG4, ERG5, SCS7, GPD2, GRE2, IDH2, MDH1, GPD1, HMG1, HMG2, SER3, DLD1, DSF1, GRE3, MAE1, AAD10, AAD14, AAD4, ARA1, ARA2, GUT2, YPR1, ADH4, GCY1, ALO1, CYC2, GLR1, MET12, PUT1, SDH1, FRD1, MET5, OSM1, OYE2, OYE3, TRR2, YHB1, MCR1, CBR1, LPD1, MET10, MET13, PDB1, GAL80, PAN2, RAX2, SWT21, TDA3, AIM33, IRC15, TKL1, ADI1, ARR2, BNA1, BNA2, BNA4, COQ6, COX15, CTT1, CUP1-2, DFG10, DIT2, DLD2, DLD3, DOT5, DUS4, ERG24, ERV2, EUG1, FET3, FMO1, FRE4, FRE5, FRE6, FRM2, GPX2, GRX2, GRX3, GRX4, GRX6, GRX7, GRX8, GTT1, HBN1, HMX1, JLP1, LIA1, LOT6, MPD1, MPD2, MXR1, MXR2, RNR3, SCO2, FOX2, IFA38, OAR1, PAN5, ARI1, IRC24, ZWF1, IMD4, ARO1, GND1, GND2, HOM6, IMD3, LYS2, CBS2, AHP1, AIM14, CCP1, CTA1, CUP1-1, SMM1, SRX1, SUR2, TPA1, TRX1, TSA1, URE2, COX5B, MET16, QCR10, QCR9, ADE3, ARO2, COR1, COX12, IDP3, LYS12, MDH2, MDH3, SER33, IRE1, TKL2, IDH1, IDP1, IDP2, FDH1, GORI and NCP1.
[0407] 21. The recombinant microbial cell of embodiment 19 or embodiment 20, wherein the oxidoreductase is encoded by a gene selected from FMS1, SUR2, SWT1, QCR9, NCP1 and GDP1.
[0408] 22. The recombinant microbial cell of any one of embodiments 19-21, wherein the recombinant microbial cell comprises a deletion of a gene encoding the oxidoreductase.
[0409] 23. The recombinant microbial cell of any one of embodiments 20-22, wherein the recombinant microbial cell comprises a mutation in a gene encoding the oxidoreductase.
[0410] 24. The recombinant microbial cell of embodiment 23, wherein the mutation is an insertion, a deletion, a substitution of one or more amino acids in the coding and/or non-coding regions of the gene.
[0411] 25. The recombinant microbial cell of any one of embodiments 19-24, wherein the recombinant microbial cell comprises a deletion of the gene encoding FMS1 oxidoreductase.
[0412] 26. The recombinant microbial cell of any one of embodiments 19-25, wherein the recombinant microbial cell comprises a deletion of a gene encoding SUR2 oxidoreductase.
[0413] 27. The recombinant microbial cell of any one of embodiments 19-26, wherein the recombinant microbial cell comprises a heterologous promoter operably linked to a gene encoding the oxidoreductase.
[0414] 28. The recombinant microbial cell of embodiment 27, wherein the heterologous promoter is a weaker promoter, as compared to the native promoter of the gene encoding the oxidoreductase.
[0415] 29. The recombinant microbial cell of embodiment 27 or 28, wherein the heterologous promoter is TDH3 or YEF3.
[0416] 30. The recombinant microbial cell of any one of embodiments 19-29, wherein the recombinant microbial cell comprises TDH3 promoter operably linked to a gene encoding SWT1 oxidoreductase.
[0417] 31. The recombinant microbial cell of any one of embodiments 19-30, wherein the recombinant microbial cell comprises YEF3 promoter operably linked to a gene encoding QCR9 oxidoreductase.
[0418] 32. The recombinant microbial cell of any one of embodiments 19-31, wherein the recombinant microbial cell comprises an expression cassette comprising a gene encoding the oxidoreductase operatively linked to a promoter.
[0419] 33. The recombinant microbial cell of any one of embodiments 19-32, wherein the recombinant microbial cell comprises an expression cassette comprising a gene encoding NCP1 oxidoreductase or GPD1 oxidoreductase operatively linked to GAL7 promoter.
[0420] 34. A method for the production of nepetalactol from a sugar substrate, said method comprising: (a) providing a recombinant microbial cell according to any one of embodiments 1-33; and (b) cultivating the recombinant microbial cell in a suitable cultivation medium comprising the microbial feedstock, thereby producing nepetalactol.
[0421] 35. The method of embodiment 34, wherein the sugar substrate is selected from the group consisting of glucose, sucrose, maltose, lactose, glycerol, and ethanol.
[0422] 36. The method of embodiment 35, wherein the sugar substrate is glucose.
[0423] 37. A method for the production of nepetalactone from a sugar substrate, said method comprising:
   [0424] (a) providing a recombinant microbial cell according to any one of embodiments 12-33; and
   [0425] (b) cultivating the recombinant microbial cell in a suitable cultivation medium comprising the microbial feedstock, thereby producing nepetalactone.
[0426] 38. The method of embodiment 37, wherein the sugar substrate is selected from the group consisting of glucose, sucrose, maltose, lactose, glycerol, and ethanol.
[0427] 39. The method of embodiment 38, wherein the sugar substrate is glucose.
[0428] 40. A method for the production of dihydronepetalactone from a sugar substrate, said method comprising: (a) providing a recombinant microbial cell according to any one of embodiments 14-33; and (b) cultivating the recombinant microbial cell in a suitable cultivation medium comprising the microbial feedstock, thereby producing dihydronepetalactone.
[0429] 41. The method of embodiment 40, wherein the sugar substrate is selected from the group consisting of glucose, sucrose, maltose, lactose, glycerol, and ethanol.
[0430] 42. The method of embodiment 41, wherein the sugar substrate is glucose.
[0431] 43. A recombinant microbial cell capable of producing nepetalactone, wherein said recombinant microbial cell comprises a nucleic acid encoding for a heterologous nepetalactol oxidoreductase (NOR) enzyme that catalyzes the reduction of nepetalactol to nepetalactone.
[0432] 44. The recombinant microbial cell of embodiment 43, wherein the NOR enzyme is also capable of catalyzing the cyclization of an enol intermediate to nepetalactol.
[0433] 45. The recombinant microbial cell of embodiment 43 or 44, wherein the recombinant microbial cell is capable of producing industrially relevant quantities of nepetalactone of greater than 400, 450, 500, 550, 600, 650, 700, 750, 800, 850, 900, 950, 1000, 1050, 1100, 1150, 1200, 1250, 1300, 1350, 1400, 1450, or 1500 micrograms of nepetalactone per liter of culture.
[0434] 46. The recombinant microbial cell of any one of embodiments 43-45, wherein the recombinant microbial cell comprises one or more polynucleotide(s) encoding one or more heterologous enzymes selected from the group consisting of: a geraniol diphosphate synthase (GPPS), a geranyl diphosphate diphosphatase (geraniol synthase, GES), a geraniol 8-hydroxylase (G8H), a cytochrome P450 reductase (CPR) capable of promoting regeneration of the redox state of the G8H, a cytochrome B5 (CYTB5) capable of promoting regeneration of the redox state of the G8H, an 8-hydroxygeraniol dehydrogenase (8HGO), an iridoid synthase (ISY), and a nepetalactol synthase (NEPS).
[0435] 47. The recombinant microbial cell of any one of embodiments 43-46, wherein the recombinant microbial cell comprises a polynucleotide encoding a heterologous geraniol diphosphate synthase (GPPS).
[0436] 48. The recombinant microbial cell of any one of embodiments 43-47, wherein the recombinant microbial cell comprises a polynucleotide encoding a heterologous geranyl diphosphate diphosphatase (geraniol synthase, GES).
[0437] 49. The recombinant microbial cell of any one of embodiments 43-48, wherein the recombinant microbial cell comprises a polynucleotide encoding a heterologous geraniol 8-hydroxylase (G8H).
[0438] 50. The recombinant microbial cell of any one of embodiments 43-49, wherein the recombinant microbial cell comprises a polynucleotide encoding a heterologous cytochrome P450 reductase (CPR) capable of promoting regeneration of the redox state of geraniol 8-hydroxylase.
[0439] 51. The recombinant microbial cell of any one of embodiments 43-50, wherein the recombinant microbial cell comprises a polynucleotide encoding a heterologous cytochrome B5 (CYTB5) capable of promoting regeneration of the redox state of geraniol 8-hydroxylase.
[0440] 52. The recombinant microbial cell of any one of embodiments 43-51, wherein the recombinant microbial cell comprises a polynucleotide encoding a heterologous 8-hydroxygeraniol dehydrogenase (8HGO).
[0441] 53. The recombinant microbial cell of any one of embodiments 43-52, wherein the recombinant microbial cell comprises a polynucleotide encoding a heterologous iridoid synthase (ISY).
[0442] 54. The recombinant microbial cell of any one of embodiments 43-53, wherein the recombinant microbial cell comprises a polynucleotide encoding a heterologous nepetalactol synthase (NEPS).
[0443] 55. The recombinant microbial cell of any one of embodiments 43-54, wherein the recombinant microbial cell is engineered to overexpress one or more enzymes from the mevalonate pathway selected from the group consisting of; acetyl-coA acetyltransferase (ERG10), hydroxymethylglutaryl-coA synthase (ERG13), HMG-CoA reductase (tHMG), mevalonate kinase (ERG12), phosphomevalonate kinase (ERG8), mevalonate decarboxylase (ERG19), and IPP isomerase (IDI).
[0444] 56. The recombinant microbial cell of any one of embodiments 43-55, wherein the recombinant microbial cell is engineered to overexpress acetyl-coA acetyltransferase (ERG10).
[0445] 57. The recombinant microbial cell of any one of embodiments 43-56, wherein the recombinant microbial cell is engineered to overexpress hydroxymethylglutaryl-coA synthase (ERG13).
[0446] 58. The recombinant microbial cell of any one of embodiments 43-57, wherein the recombinant microbial cell is engineered to overexpress HMG-CoA reductase (tHMG).
[0447] 59. The recombinant microbial cell of any one of embodiments 43-58, wherein the tHMG is truncated to lack the membrane-binding region.
[0448] 60. The recombinant microbial cell of any one of embodiments 43-59, wherein the recombinant microbial cell is engineered to overexpress mevalonate kinase (ERG12).
[0449] 61. The recombinant microbial cell of any one of embodiments 43-60, wherein the recombinant microbial cell is engineered to overexpress phosphomevalonate kinase (ERG8)
[0450] 62. The recombinant microbial cell of any one of embodiments 43-61, wherein the recombinant microbial cell is engineered to overexpress mevalonate decarboxylase (ERG19).
[0451] 63. The recombinant microbial cell of any one of embodiments 43-62, wherein the recombinant microbial cell is engineered to overexpress IPP isomerase (IDI).
[0452] 64. A method for the production of nepetalactone, said method comprising: (a) providing a recombinant microbial cell according to any one of embodiments 43-63; (b) cultivating the recombinant microbial cell in a suitable cultivation medium; and (c) contacting the recombinant microbial cell with nepetalactol substrate to form nepetalactone.
[0453] 65. A recombinant microbial cell capable of producing dihydronepetalactone, wherein said recombinant microbial cell comprises a nucleic acid encoding for a heterologous dihydronepetalactone dehydrogenase (DND) enzyme capable of converting nepetalactone to dihydronepetalactone.
[0454] 66. The recombinant microbial cell of embodiment 65, wherein the recombinant microbial cell is capable of producing industrially relevant quantities of dihydronepetalactone of greater than 1 gram per liter.
[0455] 67. The recombinant microbial cell of embodiment 65 or 66, wherein the recombinant microbial cell comprises one or more polynucleotide(s) encoding one or more heterologous enzymes selected from the group consisting of; a geraniol diphosphate synthase (GPPS), a geranyl diphosphate diphosphatase (geraniol synthase, GES), a geraniol 8-hydroxylase (G8H), a cytochrome P450 reductase (CPR) capable of promoting regeneration of the redox state of the G8H, a cytochrome B5 (CYTB5) capable of promoting regeneration of the redox state of the G8H, an 8-hydroxygeraniol dehydrogenase (8HGO), an iridoid synthase (ISY), a nepetalactol synthase (NEPS), and nepetalactol oxidoreductase (NOR).
[0456] 68. The recombinant microbial cell of any one of embodiments 65-67, wherein the recombinant microbial cell comprises a polynucleotide encoding a heterologous geraniol diphosphate synthase (GPPS).
[0457] 69. The recombinant microbial cell of any one of embodiments 65-68, wherein the recombinant microbial cell comprises a polynucleotide encoding a heterologous geranyl diphosphate diphosphatase (geraniol synthase, GES).
[0458] 70. The recombinant microbial cell of any one of embodiments 65-69, wherein the recombinant microbial cell comprises a polynucleotide encoding a heterologous geraniol 8-hydroxylase (G8H).
[0459] 71. The recombinant microbial cell of any one of embodiments 65-70, wherein the recombinant microbial cell comprises a polynucleotide encoding a heterologous cytochrome P450 reductase (CPR) capable of promoting regeneration of the redox state of geraniol 8-hydroxylase.
[0460] 72. The recombinant microbial cell of any one of embodiments 65-71, wherein the recombinant microbial cell comprises a polynucleotide encoding a heterologous cytochrome B5 (CYTB5) capable of promoting regeneration of the redox state of geraniol 8-hydroxylase.
[0461] 73. The recombinant microbial cell of any one of embodiments 65-72, wherein the recombinant microbial cell comprises a polynucleotide encoding a heterologous 8-hydroxygeraniol dehydrogenase (8HGO).
[0462] 74. The recombinant microbial cell of any one of embodiments 65-73, wherein the recombinant microbial cell comprises a polynucleotide encoding a heterologous iridoid synthase (ISY).
[0463] 75. The recombinant microbial cell of any one of embodiments 65-74, wherein the recombinant microbial cell comprises a polynucleotide encoding a heterologous nepetalactol synthase (NEPS).
[0464] 76. The recombinant microbial cell of any one of embodiments 65-75, wherein the recombinant microbial cell comprises a polynucleotide encoding a heterologous nepetalactol oxidoreductase (NOR).
[0465] 77. The recombinant microbial cell of any one of embodiments 65-76, wherein the recombinant microbial cell is engineered to overexpress one or more enzymes from the mevalonate pathway selected from the group consisting of: acetyl-coA acetyltransferase (ERG10), hydroxymethylglutaryl-coA synthase (ERG13), HMG-CoA reductase (tHMG), mevalonate kinase (ERG12), phosphomevalonate kinase (ERG8), mevalonate decarboxylase (ERG19), and IPP isomerase (IDI).
[0466] 78. The recombinant microbial cell of any one of embodiments 65-77, wherein the recombinant microbial cell is engineered to overexpress acetyl-coA acetyltransferase (ERG10).
[0467] 79. The recombinant microbial cell of any one of embodiments 65-78, wherein the recombinant microbial cell is engineered to overexpress hydroxymethylglutaryl-coA synthase (ERG13).
[0468] 80. The recombinant microbial cell of any one of embodiments 65-79, wherein the recombinant microbial cell is engineered to overexpress HMG-CoA reductase (tHMG).
[0469] 81. The recombinant microbial cell of embodiment 80, wherein the tHMG is truncated to lack the membrane-binding region.
[0470] 82. The recombinant microbial cell of any one of embodiments 65-81, wherein the recombinant microbial cell is engineered to overexpress mevalonate kinase (ERG12).
[0471] 83. The recombinant microbial cell of any one of embodiments 65-82, wherein the recombinant microbial cell is engineered to overexpress phosphomevalonate kinase (ERG8).
[0472] 84. The recombinant microbial cell of any one of embodiments 65-83, wherein the recombinant microbial cell is engineered to overexpress mevalonate decarboxylase (ERG19).
[0473] 85. The recombinant microbial cell of any one of embodiments 65-84, wherein the recombinant microbial cell is engineered to overexpress IPP isomerase (IDI).
[0474] 86. A method for the production of dihydronepetalactone, said method comprising: (a) providing a recombinant microbial cell according to any one of embodiments 65-85; (b) cultivating the recombinant microbial cell in a suitable cultivation medium; and (c) contacting the recombinant microbial cell with nepetalactone substrate to form dihydronepetalactone.
[0475] 87. A for producing a desired product selected from the group consisting of nepetalactol, nepetalactone, and dihydronepetalactone, said bioreactor containing a composition comprising a first phase and a second phase, wherein the first phase is an aqueous phase comprising a microbial cell capable of synthesizing the product, and wherein the second phase comprises an organic solvent and at least a portion of the desired product synthesized by the microbial cell.
[0476] 88. The bioreactor of embodiment 87, wherein the microbial cell is the recombinant microbial cell of any one of embodiments 1-33, 43-63 and 65-85.
[0477] 89. The bioreactor of embodiment 87 or 88, wherein the organic solvent is selected from the group consisting of: corn oil, dodecane, hexadecane, oleyl alcohol, butyl oleate, dibutyl phthalate, dodecanol, dioctyl phthalate, farnesene, methyl oleate, and isopropyl myristate.
[0478] 90. The bioreactor of embodiment 87 or 88, wherein the organic solvent comprises one or more of olive oil, sesame oil, castor oil, cotton-seed oil, soybean oil, butane, pentane, heptane, octane, isooctane, nonane, decane, methyl oleate, and terpene.
[0479] 91. The bioreactor of embodiment 87 or 88, wherein the organic solvent is a polymer.
[0480] 92. The bioreactor of embodiment 91, wherein the polymer is selected from the group consisting of PolyTHF, Hytrel, PT-series, and Pebax.
[0481] 93. The bioreactor of embodiment 87 or 88, wherein the organic solvent comprises a polymer.
[0482] 94. The bioreactor of any one of embodiments 87-93, wherein said bioreactor comprises a control mechanism configured to control at least one or more of pH, solvent, temperature, and dissolved oxygen.
[0483] 95. A method for producing a desired product selected from the group consisting of nepetalactol, nepetalactone, and dihydronepetalactone, said method comprising the steps of;
   [0484] a) growing an aqueous culture of microbial cells configured to produce the desired product in response to a chemical inducer/repressor, in the absence of the chemical inducer or presence of the chemical repressor;
   [0485] b) contacting the microbial cells with the chemical inducer and/or depletion of the repressor; and
   [0486] c) adding an organic solvent to the producing aqueous culture, said organic solvent having low solubility with the aqueous culture, wherein product secreted by the microbial cells accumulates in the organic solvent, thereby reducing contact of the product with the microbial cells.
[0487] 96. The method of embodiment 95, wherein the organic solvent is added at the time the aqueous culture is grown.
[0488] 97. The method of embodiment 95 or 96, wherein the microbial cells comprise the recombinant microbial cell of any one of embodiments 1-33, 43-63 and 65-85.
[0489] 98. The method of any one of embodiments 95-97, wherein the organic solvent is selected from the group consisting of: corn oil, dodecane, hexadecane, oleyl alcohol, butyl oleate, dibutyl phthalate, dodecanol, dioctyl phthalate, farnesene, and isopropyl myristate.
[0490] 99. The method of any one of embodiments 95-97, wherein the organic solvent comprises one or more of olive oil, sesame oil, castor oil, cotton-seed oil, soybean oil, butane, pentane, heptane, octane, isooctane, nonane, decane, and terpene.
[0491] 100. The method of any one of embodiments 95-97, wherein the organic solvent is a polymer.
[0492] 101. The method of embodiment 100, wherein the polymer is selected from the group consisting of PolyTHF, Hytrel, PT-series, and Pebax.
[0493] 102. The method of any one of embodiments 95-97, wherein the organic solvent comprises a polymer.
[0494] 103. The method of any one of embodiments 95-102, wherein the culture is a fed-batch culture.
[0495] 104. The method of embodiment 95-103, wherein the organic solvent is added as part of a fed batch portion.
[0496] 105. The method of any one of embodiments 95-104, comprising the step of: d) removing at least a portion of the organic solvent from the culture, thereby harvesting the desired product.
[0497] 106. A recombinant microbial cell comprising a polynucleotide encoding for a heterologous nepetalactol synthase (NEPS) enzyme.
[0498] 107. The recombinant microbial cell of any one of embodiment 106, wherein the heterologous NEPS enzyme exhibits at least 90%, 95%, 97%, or 100% sequence identity with an amino acid sequence selected from the group consisting of SEQ ID Nos 730, 731, 732, 733, 734, 735, 736, 737, 738, 739, 740, 741, 742, 743, 744, 745, 746, 747, 748, 749, 750, 751, 752, 753, 754, 755, 756, 757, 758, 759, 760, 761, 762, 763, 764, 765, 766, 767, 768, 769, 770, 771, 772, 773, and 774.
[0499] 108. The recombinant microbial cell of any one of embodiments 106-107, wherein the heterologous NEPS enzyme exhibits at least 90%, 95%, 97%, or 100% sequence identity with an amino acid sequence selected from the group consisting of SEQ ID Nos SEQ ID Nos 730, 731, 732, and 733.
[0500] 109. The recombinant microbial cell of any one of embodiments 106-108, wherein the recombinant microbial cell comprises one or more polynucleotide(s) encoding each of the following heterologous enzymes: a geraniol diphosphate synthase (GPPS), a geranyl diphosphate diphosphatase (geraniol synthase, GES), a geraniol 8-hydroxylase (G8H), a cytochrome P450 reductase (CPR) capable of promoting regeneration of the redox state of the G8H, a cytochrome B5 (CYTB5) capable of promoting regeneration of the redox state of the G8H, an 8-hydroxygeraniol dehydrogenase (8HGO), an iridoid synthase (ISY).
[0501] 110. A recombinant microbial cell comprising a polynucleotide encoding for a nepetalactol oxidoreductase (NOR) heterologous enzyme.
[0502] 111. The recombinant microbial cell of embodiment 110, wherein the recombinant microbial cell is capable of producing industrially relevant quantities of nepetalactone of greater than 400, 450, 500, 550, 600, 650, 700, 750, 800, 850, 900, 950, 1000, 1050, 1100, 1150, 1200, 1250, 1300, 1350, 1400, 1450, or 1500 micrograms of nepetalactone per liter of culture.
[0503] 112. The recombinant microbial cell of any one of embodiments 110-111, wherein the NOR enzyme exhibits at least 90%, 95%, 97%, or 100% sequence identity with an amino acid sequence selected from the group consisting of SEQ ID Nos 520-607, 775-782 and 1642-1644.
[0504] 113. The recombinant microbial cell of any one of embodiments 110-112, wherein the NOR enzyme exhibits at least 90%, 95%, 97%, or 100% sequence identity with SEQ ID No 605.
[0505] 114. A recombinant microbial cell capable of producing nepetalactol, wherein the recombinant microbial cell expresses altered levels of an oxidoreductase, as compared to a wild type microbial cell.
[0506] 115. The recombinant microbial cell of embodiment 114, wherein the oxidoreductase is encoded by a gene selected from OYE2, OYE3, ADH3, ALD4, BDH2, PUT2, SOR2, ALD3, ALD5, HFD1, UGA2, ADH5, ALD6, SFA1, MSC7, AYR1, SPS19, ALD2, PRO2, SOR1, ADH2, ADH1, HIS4, ZTA1, ETR1, AST1, YIM1, AST2, SDH2, CIR2, ARG5,6, HOM2, TDH1, TDH2, TDH3, AAD15, CYB2, DUS1, DUS3, ENV9, EPS1, FET5, FMS1, FRE1, FRE2, FRE3, FRE7, FRE8, GDH2, GIS1, GPX1, GRX1, GRX5, HEM14, HYR1, JHD1, JHD2, KGD1, LYS1, LYS9, MET8, MIS1, MTD1, NDI1, PDX3, POX1, PRX1, RNR4, RPH1, SCO1, SHH4, SOD1, SOD2, TRX3, TSA2, URA1, YMR31, COX13, COX4, COX5A, COX6, COX7, COX8, COX9, GCV1, GCV2, GCV3, GDH1, GDH3, GLT1, NDE1, NDE2, PDA1, QCR2, QCR6, QCR7, QCR8, RNR1, SDH4, TRX2, TYR1, ADH6, BDH1, XYL2, CAT5, ERG3, ERG4, ERG5, SCS7, GPD2, GRE2, IDH2, MDH1, GPD1, HMG1, HMG2, SER3, DLD1, DSF1, GRE3, MAE1, AAD10, AAD14, AAD4, ARA1, ARA2, GUT2, YPR1, ADH4, GCY1, ALO1, CYC2, GLR1, MET12, PUT1, SDH1, FRD1, MET5, OSM1, OYE2, OYE3, TRR2, YHB1, MCR1, CBR1, LPD1, MET10, MET13, PDB1, GAL80, PAN2, RAX2, SWT21, TDA3, AIM33, IRC15, TKL1, ADI1, ARR2, BNA1, BNA2, BNA4, COQ6, COX15, CTT1, CUP1-2, DFG10, DIT2, DLD2, DLD3, DOT5, DUS4, ERG24, ERV2, EUG1, FET3, FMO1, FRE4, FRE5, FRE6, FRM2, GPX2, GRX2, GRX3, GRX4, GRX6, GRX7, GRX8, GTT1, HBN1, HMX1, JLP1, LIA1, LOT6, MPD1, MPD2, MXR1, MXR2, RNR3, SCO2, FOX2, IFA38, OAR1, PAN5, ARI1, IRC24, ZWF1, IMD4, ARO1, GND1, GND2, HOM6, IMD3, LYS2, CBS2, AHP1, AIM14, CCP1, CTA1, CUP1-1, SMM1, SRX1, SUR2, TPA1, TRX1, TSA1, URE2, COX5B, MET16, QCR10, QCR9, ADE3, ARO2, COR1, COX12, IDP3, LYS12, MDH2, MDH3, SER33, IRE1, TKL2, IDH1, IDP1, IDP2, FDH1, GORI and NCP1.
[0507] 116. The recombinant microbial cell of embodiment 114 or embodiment 115, wherein the oxidoreductase is encoded by a gene selected from FMS1, SUR2, SWT1, QCR9, NCP1 and GDP1.
[0508] 117. The recombinant microbial cell of any one of embodiments 114-116, wherein the recombinant microbial cell comprises a deletion of a gene encoding the oxidoreductase.
[0509] 118. The recombinant microbial cell of any one of embodiments 114-117, wherein the recombinant microbial cell comprises a mutation in a gene encoding the oxidoreductase.
[0510] 119. The recombinant microbial cell of embodiment 118, wherein the mutation is an insertion, a deletion, a substitution of one or more amino acids in the coding and/or non-coding regions of the gene.
[0511] 120. The recombinant microbial cell of any one of embodiments 114-119, wherein the recombinant microbial cell comprises a deletion of a gene encoding FMS1 oxidoreductase.
[0512] 121. The recombinant microbial cell of any one of embodiments 114-120, wherein the recombinant microbial cell comprises a deletion of a gene encoding SUR2 oxidoreductase.
[0513] 122. The recombinant microbial cell of any one of embodiments 114-121, wherein the recombinant microbial cell comprises a heterologous promoter operably linked to a gene encoding the oxidoreductase.
[0514] 123. The recombinant microbial cell of embodiment 122, wherein the heterologous promoter is a weaker promoter, as compared to the native promoter of the gene encoding the oxidoreductase.
[0515] 124. The recombinant microbial cell of embodiment 122 or 123, wherein the heterologous promoter is TDH3 or YEF3.
[0516] 125. The recombinant microbial cell of any one of embodiments 114-124, wherein the recombinant microbial cell comprises TDH3 promoter operably linked to a gene encoding SWT1 oxidoreductase.
[0517] 126. The recombinant microbial cell of any one of embodiments 114-125, wherein the recombinant microbial cell comprises YEF3 promoter operably linked to a gene encoding QCR9 oxidoreductase.
[0518] 127. The recombinant microbial cell of any one of embodiments 114-126, wherein the recombinant microbial cell comprises an expression cassette comprising a gene encoding the oxidoreductase operatively linked to a promoter.
[0519] 128. The recombinant microbial cell of any one of embodiments 114-127, wherein the recombinant microbial cell comprises an expression cassette comprising a gene encoding NCP1 oxidoreductase or GPD1 oxidoreductase operatively linked to GAL7 promoter.
[0520] 129. The recombinant microbial cell of any one of embodiments 114-128, wherein the recombinant microbial cell produces higher levels of nepetalactol and/or lower levels of geranic acid, as compared to a control recombinant cell, wherein the control recombinant cell has wild type levels of the oxidoreductase.
[0521] 130. The recombinant microbial cell of any one of embodiments 114-129, wherein the recombinant microbial cell comprises a polynucleotide encoding a nepetalactol oxidoreductase (NOR) enzyme.
[0522] 131. The recombinant microbial cell of embodiment 130, wherein the recombinant microbial cell produces one or more of the following: higher levels of nepetalactol, higher levels of nepetalactone, and lower levels of geranic acid, as compared to a control recombinant cell, wherein the control recombinant cell has wild type levels of the oxidoreductase.
[0523] 132. The recombinant microbial cell of any one of embodiments 114-131, wherein the recombinant microbial cell comprises one or more polynucleotides encoding each of the following heterologous enzymes: a nepetalactol oxidoreductase (NOR), and a dihydronepatalactone dehydrogenase (DND) capable of converting nepetalactone to dihydronepetalactone.
[0524] 133. The recombinant microbial cell of embodiment 132, wherein the recombinant microbial cell produces one or more of the following: higher levels of nepetalactol, higher levels of nepetalactone, higher levels of dihydronepetalactone, and lower levels of geranic acid, as compared to a control recombinant cell, wherein the control recombinant cell has wild type levels of the oxidoreductase.
[0525] 134. A method of producing nepetalactol, said method comprising: (a) providing a recombinant microbial cell of any one of embodiments 114-133; and (b) cultivating the recombinant microbial cell in a suitable cultivation medium; (c) contacting the recombinant microbial cell with a nepetalactol precursor to form nepetalactol.
[0526] 135. A method of producing nepetalactone, said method comprising: (a) providing a recombinant microbial cell of any one of embodiments 130-133; and (b) cultivating the recombinant microbial cell in a suitable cultivation medium; (c) contacting the recombinant microbial cell with a nepetalactone precursor to form nepetalactone.
[0527] 136. A method of producing dihydronepetalactone, said method comprising: (a) providing a recombinant microbial cell of embodiment 132 or 133; and (b) cultivating the recombinant microbial cell in a suitable cultivation medium; (c) contacting the recombinant microbial cell with a dihydronepetalactone precursor to form dihydronepetalactone.
[0528] 137. A method for the production of nepetalactol or nepetalactone, said method comprising: (a) providing a recombinant microbial cell according to any one of embodiments 1-136; (b) cultivating the recombinant microbial cell in a suitable cultivation medium; and (c) contacting the recombinant microbial cell with nepetalactol substrate to form nepetalactone.
[0529] 138. A recombinant microbial cell comprising a nucleic acid encoding for an iridiod synthase (ISY) enzyme exhibiting at least 85%, 90%, 95%, 97%, or 100% sequence identity with any one of the ISY enzymes listed in FIG. 3 or 4 or Tables 6 or 8.
[0530] 139. A recombinant microbial cell comprising a nucleic acid encoding for an 8-hydroxygeraniol (8HGO) enzyme exhibiting at least 85%, 90%, 95%, 97%, or 100% sequence identity with any one of the 8HGO enzymes listed in FIG. 5 or table 8.

### INCORPORATION BY REFERENCE

[0531] All references, articles, publications, patents, patent publications, and patent applications cited herein are incorporated by reference in their entireties for all purposes. International PCT application No. PCT/US2018/067333, filed on Dec. 21, 2018 is hereby incorporated by reference in its entirety for all purposes. U.S. provisional Application No. 62/609,272, filed on Dec. 21, 2017, U.S. Provisional Application 62/609,279, filed on Dec. 21, 2017, and U.S. Provisional Application 62/669,919, filed on May 10, 2018, are each hereby incorporated by reference in their entireties for all purposes. However, mention of any reference, article, publication, patent, patent publication, and patent application cited herein is not, and should not, be taken as an acknowledgment or any form of suggestion that they constitute valid prior art or form part of the common general knowledge in any country in the world.

1.-137. (canceled)

138. A recombinant microbial cell capable of producing nepetalactol, wherein the recombinant microbial cell expresses an altered level of an oxidoreductase, as compared to a wild type microbial cell, wherein the oxidoreductase is selected from FMS1, SUR2, SWT21, QCR9, and NCP1.

139. The recombinant microbial cell of claim 138, wherein the oxidoreductase comprises an amino acid sequence encoded by a nucleic acid sequence selected from the group consisting of SEQ ID No. 1844, 1845, 1847, 1849, and 1851.

140. The recombinant microbial cell of claim 138, wherein the recombinant microbial cell is capable of producing: (a) higher levels of nepetalactol, (b) lower levels of geranic acid, or (c) a combination thereof, as compared to a control microbial cell without the altered oxidoreductase level.

141. The recombinant microbial cell of claim 138, wherein the recombinant microbial cell is capable of producing nepetalactol at a level of at least about 0.10 g/L.

142. The recombinant microbial cell of claim 138, wherein the recombinant microbial cell comprises a heterologous nepetalactol synthase (NEPS) enzyme.

143. The recombinant microbial cell of claim 142, wherein the recombinant microbial cell comprises each of the following heterologous enzymes: a geraniol diphosphate synthase (GPPS), a geranyl diphosphate diphosphatase (geraniol synthase, GES), a geraniol 8-hydroxylase (G8H), a cytochrome P450 reductase (CPR) capable of promoting regeneration of the redox state of the G8H, a cytochrome 5 (CYTB5) capable of promoting regeneration of the redox state of the G8H, an 8-hydroxygeraniol dehydrogenase (8HGO), and an iridoid synthase (ISY).

144. The recombinant microbial cell of claim 142, wherein the heterologous NEPS enzyme has at least 90% sequence identity to an amino acid sequence selected from the group consisting of SEQ ID Nos. 730, 731, 732, 733, 734, 735, 736, 737, 738, 739, 740, 741, 742, 743, 744, 745, 746, 747, 748, 749, 750, 751, 752, 753, 754, 755, 756, 757, 758, 759, 760, 761, 762, 763, 764, 765, 766, 767, 768, 769, 770, 771, 772, 773, and 774.

145. The recombinant microbial cell of claim 138, wherein the recombinant microbial cell is engineered to overexpress one or more enzymes from the mevalonate pathway selected from the group consisting of: acetyl-coA acetyltransferase (ERG10), hydroxymethyglutarylcoA synthase (ERG13), HMG-CoA reductase (tHMG), mevalonate kinase (ERG12), phosphomevalonate kinase (ERG8), mevalonate decarboxylase (ERG19), and IPP isomerase (IDI), as compared to a wild type microbial cell.

146. The recombinant microbial cell of claim 138, wherein the recombinant microbial cell comprises a heterologous nepetalactol oxidoreductase (NOR) enzyme.

147. The recombinant microbial cell of claim 146, wherein the NOR enzyme has at least 90% sequence identity to an amino acid sequence selected from the group consisting of SEQ ID Nos. 520-607, 775-782 and 1642-1644.

148. The recombinant microbial cell of claim 146, wherein the recombinant microbial cell is capable of producing one or more of the following: (a) higher levels of nepetalactone, (b) higher levels of nepetalactol, and (c) lower levels of geranic acid, as compared to a control microbial cell, wherein the control microbial cell has wild type levels of the oxidoreductase.

149. The recombinant microbial cell of claim 138, wherein the recombinant microbial cell expresses a reduced level of the oxidoreductase, as compared to the wild type microbial cell.

150. The recombinant microbial cell of claim 149, wherein the recombinant microbial cell comprises a deletion of the oxidoreductase encoding gene.

151. The recombinant microbial cell of claim 150, wherein oxidoreductase is FMS1 or SUR2.

152. The recombinant microbial cell of claim 149, wherein the recombinant microbial cell comprises a heterologous promoter expressing the oxidoreductase, wherein the heterologous promoter is a weaker promoter, as compared to the native promoter of the gene encoding the oxidoreductase.

153. The recombinant microbial cell of claim 152, wherein the weaker promoter is a TDH3 promoter or a YEF3 promoter.

154. The recombinant microbial cell of claim 153, wherein the recombinant microbial cell comprises: (a) the TDH3 promoter expressing SWT21, or (b) the YEF3 promoter expressing QCR9.

155. The recombinant microbial cell of claim 138, wherein the recombinant microbial cell expresses an increased level of the oxidoreductase, as compared to the wild type microbial cell.

156. The recombinant microbial cell of claim 155, wherein the recombinant microbial cell comprises a heterologous promoter expressing the oxidoreductase, wherein the heterologous promoter is a stronger promoter, as compared to the native promoter of the gene encoding the oxidoreductase.

157. The recombinant microbial cell of claim 156, wherein the stronger promoter is a GAL7 promoter.

158. The recombinant microbial cell of claim 157, wherein the recombinant microbial cell comprises the GAL7 promoter expressing NCP1.

159. The recombinant microbial cell of claim 138, wherein the recombinant microbial cell belongs to a genus selected from the group consisting of: Agrobacterium, Alicyclobaeilius, Anabaena, Anacystis, Acmetobacter, Acidothermus, Arthrobacter, Azobacter, Bacillus, Bifidobacterium, Brevibaeierium, Bulynvibrio, Buchnera, Campestns, Camplyobacter, Clostridium, Corynebacterium, Chromatium, Coprococcus, Escherichia, Enterococcus, Enterobacter, Erwmia, Fusobacterium, Faeealibacterium, Francisella, Flavobacterium, Geobacillus, Haemophilus, Helicobacter, Klebsiella, Lactobacillus, Lactcoccus, Ilyobacter, Micrococcus, Microbacterium, Mesorhizobium, Methylobacterium, Methylobacterium, Mycobacterium, Neisseria, Pantoea, Pseudomonas, Prochlorococcus, Rhodobacter, Rhodopseudomonas, Rhodopseudomonas, Roseburia, Rhodospirillum, Rhodococcus, Scenedesmus, Streptomyces, Streptococcus, Synecoccus, Saccharomyces, Saccharomonospora, Staphylococcus, Serratia, Salmonella, Shigella, Thermoanaerobacterium, Tropheryma, Tularensis, Temecula, Thermosynechococcus, Thermococcus, Ureaplasma, Xanthomonas, Xylella, Yersinia, and Zymomonas.

160. The recombinant microbial cell of claim 138, wherein the recombinant microbial cell is Saccharomyces cerevisiae.

161. A method of producing nepetalactol, comprising: (a) providing a recombinant microbial cell of claim 138; (b) cultivating the recombinant microbial cell in a cultivation medium capable of supporting growth of the recombinant microbial cell; and (c) contacting the recombinant microbial cell with a nepetalactol precursor to form nepetalactol.

162. A method of producing nepetalactone, comprising: (a) providing a recombinant microbial cell of claim 146; (b) cultivating the recombinant microbial cell in a cultivation medium capable of supporting growth of the recombinant microbial cell; and (c) contacting the recombinant microbial cell with a nepetalactone precursor to form nepetalactone.

The application's sequence listing, which the Patent Office published only in electronic form, follows.

SEQUENCE LISTING (1859 sequences)

SEQ ID NO: 1 - protein, 352 aa, Saccharomyces cerevisiae
MASEKEIRRERFLNVFPKLVEELNASLLAYGMPKEACDWYAHSLNYNTPGGKLNRGLSVVDTYAILSNKTVEQLGQEEYEKVAILGWCIELLQAYWLVADDMMDKSITRRGQPCWYKVPEVGEIAIWDAFMLEAAIYKLLKSHFRNEKYYIDITELFHEVTFQTELGQLMDLITAPEDKVDLSKFSLKKHSFIVTFKTAYYSFYLPVALAMYVAGITDEKDLKQARDVLIPLGEYFQIQDDYLDCFGTPEQIGKIGTDIQDNKCSWVINKALELASAEQRKTLDENYGKKDSVAEAKCKKIFNDLKIDQLYHEYEESVAKDLKAKISQVDESRGFKADVLTAFLNKVYKRSK

SEQ ID NO: 2 - protein, 352 aa, Saccharomyces cerevisiae
MASEKEIRRERFLNVFPKLVEELNASLLAYGMPKEACDWYAHSLNYNTPGGKLNRGLSVVDTYAILSNKTVEQLGQEEYEKVAILGWCIELLQAYWLVADDMMDKSITRRGQPCWYKVPEVGEIAIWDAFMLEAAIYKLLKSHFRNEKYYIDITELFHEVTFQTELGQLMDLITAPEDKVDLSKFSLKKHSFIVTFETAYYSFYLPVALAMYVAGITDEKDLKQARDVLIPLGEYFQIQDDYLDCFGTPEQIGKIGTDIQDNKCSWVINKALELASAEQRKTLDENYGKKDSVAEAKCKKIFNDLKIEQLYHEYEESIAKDLKAKISQVDESRGFKADVLTAFLNKVYKRSK

SEQ ID NO: 3 - protein, 296 aa, Abies grandis
MFDFNKYMDSKAMTVNEALNKAIPLRYPQKIYESMRYSLLAGGKRVRPVLCIAACELVGGTEELAIPTACAIEMIHTMSLMHDDLPCIDNDDLRRGKPTNHKIFGEDTAVTAGNALHSYAFEHIAVSTSKTVGADRILRMVSELGRATGSEGVMGGQMVDIASEGDPSIDLQTLEWIHIHKTAMLLECSVVCGAIIGGASEIVIERARRYARCVGLLFQVVDDILDVTKSSDELGKTAGKDLISDKATYPKLMGLEKAKEFSDELLNRAKGELSCFDPVKAAPLLGLADYVAFRQN

SEQ ID NO: 4 - protein, 360 aa, Catharanthus roseus
MANVGQQVQRQSNSVAEEPLDPFSLVADELSILANRLRSMVVAEVPKLASAAEYFFKLGVEGKRFRPTVLLLMATAIDAPISRTPPDTSLDTLSTELRLRQQTIAEITKMIHVASLLHDDVLDDAETRRGIGSLNFVMGNKLAVLAGDFLLSRACVALASLKNTEVVSLLATVVEHLVTGETMQMTTTSDQRCSMEYYMQKTYYMTASLISNSCKAIALLAGQTSEVAMLAYEYGKNLGLAFQLIDDVLDFTGTSASLGKGSLSDIRHGIVTAPILFAIEEFPELRAVVDEGFENPYNVDLALHYLGKSRGIQRTRELAIKHANLASDAIDSLPVTDDEHVLRSRRALVELTQRVITRRK

SEQ ID NO: 5 - protein, 297 aa, Picea abies
MEFDFDKYMHSKAIAVNEALDKVIPPRYPQKIYESMRYSLLAGGKRVRPILCIAACELMGGTEELAMPTACAIEMIHTMSLIHDDLPYIDNDDLRRGKPTNHKVFGEDTAIIAGDALLSLAFEHVAVSTSRTLGTDIILRLLSEIGRATGSEGVMGGQVVDIESEGDPSIDLETLEWVHIHKTAVLLECSVVCGAIMGGASEDDIERARRYARCVGLLFQVVDDILDVSQSSEELGKTAGKDLISDKATYPKLMGLEKAKEFADELLNRGKQELSCFDPTKAAPLFALADYIASRQN

SEQ ID NO: 6 - protein, 297 aa, Geobacillus sp. WSUCF1
MAQLSVEQFLNEQKRAVEAALSSYMARLRGPETLKKAMAYSLEAGGKRIRPLLLLATIQALGKDPAIGLPVACAIEMIHTYSLIHDDLPSMDNDDLRRGKPTNHKVFGEAMAILAGDALLTYAFQLIAEVDDDRVPPSVRLQLIEQLAKAAGPEGMVAGQAADMEAEGKTLALAELEYIHRHKTGKMLQYSVHAGALLGGADGRQTRELNEFAAHLGLAFQIRDDILDIEGMEEKIGKRVGSDRDNKKATYPVLLSLGGAKEKLAFHIDAAKRHLQQAKIDDAVLAYICELVAVRDH

SEQ ID NO: 7 - protein, 352 aa, Saccharomyces cerevisiae
MASEKEIRRERFLNVFPKLVEELNASLLAYGMPKEACDWYAHSLNYNTPGGKLNRGLSVVDTYAILSNKTVEQLGQEEYEKVAILGWCIELLQAYFLVADDMMDKSITRRGQPCWYKVPEVGEIAINDAFMLEAAIYKLLKSHFRNEKYYIDITELFHEVTFQTELGQLMDLITAPEDKVDLSKFSLKKHSFIVTFGTAYYSFYLPVALAMYVAGITDEKDLKQARDVLIPLGEYFQIQDDYLDCFGTPEQIGKIGTDIQDNKCSWVINKALELASAEQRKTLDENYGKKDSVAEAKCKKIFNDLKIEQLYHEYEESIAKDLKAKISQVDESRGFKADVLTAFLNKVYKRSK

SEQ ID NO: 8 - protein, 352 aa, Saccharomyces cerevisiae
MASEKEIRRERFLNVFPKLVEELNASLLAYGMPKEACDWYAHSLNYNTPGGKLNRGLSVVDTYAILSNKTVEQLGQEEYEKVAILGWCIELLQAYFLVADDMMDKSITRRGQPCWYKVPEVGEIAINDAFMLEAAIYKLLKSHFRNEKYYIDITELFHEVTFQTELGQLMDLITAPEDKVDLSKFSLKKHSFIVTFKTAYYSFYLPVALAMYVAGITDEKDLKQARDVLIPLGEYFQIQDDYLDCFGTPEQIGKIGTDIQDNKCSWVINKALELASAEQRKTLDENYGKKDSVAEAKCKKIFNDLKIEQLYHEYEESIAKDLKAKISQVDESRGFKADVLTAFLNKVYKRSK

SEQ ID NO: 9 - protein, 352 aa, Saccharomyces cerevisiae
MASEKEIRRERFLNVFPKLVEELNASLLAYGMPKEACDWYAHSLNYNTPGGKLNRGLSVVDTYAILSNKTVEQLGQEEYEKVAILGWCIELLQAYWLVADDMMDKSITRRGQPCWYKVPEVGEIAIWDAFMLEAAIYKLLKSHFRNEKYYIDITELFHEVTFQTELGQLMDLITAPEDKVDLSKFSLKKHSFIVTFKTAYYSFYLPVALAMYVAGITDEKDLKQARDVLIPLGEYFQIQDDYLDCFGTPEQIGKIGTDIQDNKCSWVINKALELASAEQRKTLDENYGKKDSVAEAKCKKIFNDLKIEQLYHEYEESIAKDLKAKISQVDESRGFKADVLTAFLNKVYKRSK

SEQ ID NO: 10 - protein, 347 aa, Neosartorya fumigata
MATTTSRAAFEAVFPTLAEDLLAHAKKYNLPENAVKWFEQVLNVNVPGGKLNRGLSVPDTGIALLQKPLTDEQFKHLSILGWLTELLQAFFLVSDDMMDSSITRRGQPCWYRHPGVGLIAINDAFMLESGIYVILKKHFRSHPAYVDFLELFHETTWQTELGQLCDLITAPEDKVDLDNFSMEKYMFIVTYKTAYYSFYLPVALALLYLELATPENLQQTHDILIPLGQYFQVQDDYLDAYGDPAVIGKIGTDIQDNKCSWLINQALQRCNTEQRKLLDTAYGRKDSELEAKVKALYKELDLEKVYKEYEEKTVGEIRRKIAAIDESQGLKKEVFEAFLGKIYKRTK

SEQ ID NO: 11 - protein, 365 aa, Catharanthus roseus
MCVSSALANVGQQVQRQSNSVAEEPLDPFSLVADELSILANRLRSMVVAEVPKLASAAEYFFKLGVEGKRFRPTVLLLMATAIDAPISRTPPDTSLDTLSTELRLRQQSIAEITEMIHVASLLHDDVLDDAETRRGIGSLNFVMGNKLAVLAGDFLLSRACVALASLKNTEVVSLLATVVEHLVTGETMQMTTTSDQRCSMEYYMQKTYYKTASLISNSCKAIALLAGQTSEVAMLAYEYGKNLGLAFQLIDDVLDFTGTSASLGKGSLSDIRHGIVTAPILFAIEEFPELRAVVDEGFENPYNVDLALHYLGKSRGIQRTRELAIKHANLASDAIDSLPVTDDEHVLRSRRALVELTQRVITRR

SEQ ID NO: 12 - protein, 304 aa, Rhizobium acidisoli
MDANRDTFETRLKNNAREIEALLDALLLPNALSDEIARPETLRSAMHYAVLNGGKRLRPFLVVESAALLGGDDEAARRVGAALECVHCYSLVHDDLPAMDDDDLRRGKPTVHIKFDEATAILAGDSLLTYAFDIIAAPETALADTSKASLVLALARAAGLGGMAGGQALDLAAEKQAPDEAGIIRLQAMKTGALIRFACEAGALIAASPPEDRRRLRAFGEKIGLAFQLADDILDLTSDTATMGKATGKDAARGKGTLVALHGIEWAEEQLRQHVRDAEALLAPYGARASTLIAAAHFIADRKS

SEQ ID NO: 13 - protein, 299 aa, Escherichia coli
MDFPQQLEACVKQANQALSRFIAPLPFQNTPVVETMQYGALLGGKRLRPFLVYATGHMFGVSTNTLDAPAAAVECIHAYFLIHDDLPAMDDDDLRRGLPTCHVKFGEANAILAGDALQTLAFSILSDADMPEVSDRDRISMISELASASGIAGMCGGQALDLDAEGKHVPLDALERIHRHKTGALIRAAVRLGALSAGDKGRRALPVLDKYAESIGLAFQVQDDILDVVGDTATLGKRQGADQQLGKSTYPALLGLEQARKKARDLIDDARQSLKQLAEQSLDTSALEALADYIIQRNK

SEQ ID NO: 14 - protein, 299 aa, Escherichia coli
MDFPQQLEACVKQANQALSRFIAPLPFQNTPVVETMQYGALLGGKRLRPFLVYATGHMFGVSTNTLDAPAAAVECIHAYSLIHDDLPAMDDDDLRRGLPTCHVKFGEANAILAGDALQTLAFSILSDADMPEVSDRDRISMISELASASGIAGMCGGQALDLDAEGKHVPLDALERIHRHKTGALIRAAVRLGALSAGDKGRRALPVLDKYAESIGLAFQVQDDILDVVGDTATLGKRQGADQQLGKSTYPALLGLEQARKKARDLIDDARQSLKQLAEQSLDTSALEALADYIIQRNK

SEQ ID NO: 15 - protein, 304 aa, Brucella suis
MEKLPVDFTTLLNRRAMEVEAALAGLLDECPRTGEIARPQRLIAAMRHGVLNGGKRLRPFLVLESAALFGQYGQAVLRVAAALECIHCYSLVHDDLPAMDDDDLRRGQPTVHKAFDEAAAILAGDSLLTYAFDIIASDETELDATTRIKLVCALTRASGLGGMAGGQALDLMAETRKPDEAGIITLQAMKTGALIRFACEAGAIIAGASQEDRERMAEFGSAIGLAFQLADDLLDVTADAGTMGKATGKDAAAGKATLVSLHGIDWTRQQLSGLVAQAESLLAPFGEDAEPLKQAARFIAERQN

SEQ ID NO: 16 - protein, 339 aa, Arabidopsis thaliana
MFSLVADELSLLSNKLREMVLAEVPKLASAAEYFFKRGVQGKQFRSTILLLMATALNVRVPEALIGESTDIVTSELRVRQRGIAEITEMIHVASLLHDDVLDDADTRRGVGSLNVVMGNKMSVLAGDFLLSRACGALAALKNTEVVALLATAVEHLVTGETMEITSSTEQRYSMDYYMQKTYYKTASLISNSCKAVAVLTGQTAEVAVLAFEYGRNLGLAFQLIDDILDFTGTSASLGKGSLSDIRHGVITAPILFAMEEFPQLREVVDQVEKDPRNVDIALEYLGKSKGIQRARELAMEHANLAAAAIGSLPETDNEDVKRSRRALIDLTHRVITRNK

SEQ ID NO: 17 - protein, 282 aa, Buchnera aphidicola
MHFFHLYERYKHRINQKLFYTLNQLPFQKSSLLKAMKYSVFSGSKRLRSSLIYSTGDVFKVNITTLDVISTAIEFIHSYSLIHDDLPCMDNDNFRRGKISCHVKYGESTSLLAGDALQSLAFNILSNSFMPNVSNLKRIKMISELSYSIGSSGMCMGQNLDLEAEKKDVNLSELEIINLYKTSFLMRSAVRLVYFSSNNFSKSILSILDLFSISIGLAFQIQDDILDFKKDSVKTDNKKIIKKHTYPLIIGLDESRKKIKQLHKKSFLALNSLKKKISIPTY

SEQ ID NO: 18 - protein, 355 aa, Dendroctonus ponderosae
MIRPVQSSALVTKEQSRDFMALFPDLVRELTEVGKSQELPDVMRRFARVLQYNTPTGKKNRGLIVLSTYRMLEDPEKLTPENIRLASILGWCVEMVHAYFLILDDIMDGSETRRGALCWFRQSGIGLTAVNDAVMIENAVYLLIKRHLKDHPMYVPLMELFHEGNLKTTLGQSLDAMCLDTNGKPKLDMFTMSRYTSIVKYKTAFYSFQMPVAIAMYLAGMSDEEQHRQAKTILMEMGQFFQIQDDFLDCFGDPTVTGKVGTDIQDGKCSWLAVVALQRASPAQRKIMEEHYGRPEPESIARIKNLYVDLCLPNTYAIYEEESFNIIKTHIQQISKGLRHDLFFKIMEKIYKREC

SEQ ID NO: 19 - protein, 314 aa, Picea abies
MKALVQLADLSEQVKNVVEFDFDKYMHSKAIAVNEALDKVIPPRYPQKIYESMRYSLLAGGKRVRPILCIAACELMGGTEELAMPTACAIEMIHTMSLIHDDLPYIDNDDLRRGKPTNHKVFGEDTAIIAGDALLSLAFEHVAVSTSRTLGTDIILRLLSEIGRATGSEGVMGGQVVDIESEGDPSIDLETLEWVHIHKTAVLLECSVVCGAIMGGASEDDIERARRYARCVGLLFQVVDDILDVSQSSEELGKTAGKDLISDKATYPKLMGLEKAKEFADELLNRGKQELSCFDPTKAAPLFALADYIASRQN

SEQ ID NO: 20 - protein, 300 aa, Abies grandis
MKAVEFDFNKYMDSKAMTVNEALNKAIPLRYPQKIYESMRYSLLAGGKRVRPVLCIAACELVGGTEELAIPTACAIEMIHTMSLMHDDLPCIDNDDLRRGKPTNHKIFGEDTAVTAGNALHSYAFEHIAVSTSKTVGADRILRMVSELGRATGSEGVMGGQMVDIASEGDPSIDLQTLEWIHIHKTAMLLECSVVCGAIIGGASEIVIERARRYARCVGLLFQVVDDILDVTKSSDELGKTAGKDLISDKATYPKLMGLEKAKEFSDELLNRAKGELSCFDPVKAAPLLGLADYVAFRQN

SEQ ID NO: 21 - protein, 371 aa, Corynebacterium glutamicum
MKDVSLSSFDAHDLDLDKFPEVVRDRLTQFLDAQELTIADIGAPVTDAVAHLRSFVLNGGKRIRPLYAWAGFLAAQGHKNSSEKLESVLDAAASLEFIQACALIHDDIIDSSDTRRGAPTVHRAVEADHRANNFEGDPEHFGVSVSILAGDMALVWAEDMLQDSGLSAEALARTRDAWRGMRTEVIGGQLLDIYLESHANESVELADSVNRFKTAAYTIARPLHLGASIAGGSPQLIDALLHYGHDIGIAFQLRDDLLGVFGDPAITGKPAGDDIREGKRTVLLALALQRADKQSPEAATAIRAGVGKVTSPEDIAVITEHIRATGAEEEVEQRISQLTESGLAHLDDVDIPDEVRAQLRALAIRSTERRM

SEQ ID NO: 22 - protein, 347 aa, Vitis vinifera
MLAEEQLDPFSLVADELSLLADRLRSMVVAEVPKLASAAEYFFKMGVEGKRFRPTVLLLMATALNVPLPRPALAEVPETLSTELRTRQQCIAEITEMIHVASLLHDDVLDDAETRRGIGSLNIMMGNKVAVLAGDFLLSRACVALASLKNTEVVSLLATVVEHLVTGETMQMTSTSEQRVSMEYYLQKTYYKTASLISNSCKAIALLAGQTAEVSMLAFEYGKNLGLAFQLIDDVLDFTGTSASLGKGSLSDIRHGIITAPILFAIEEFPQLDAVVKRGLDNPADIDLALDYLGKSRGIQRTRELAMKHANLAAEAIDSLPESGDEDVLRSRRALIDLTHRVITRTK

SEQ ID NO: 23 - protein, 319 aa, Picea abies
MLRCSNTNAQLANLSEQVKGKVTEFDFKEYMRSKAMSVNEALDRAVPLRYPEKIHEAMRYSLLAGGKRVRPILCIAACELVGGSEELAMPTACAMEIIHTMSLIHDDLPPMDNDDLRRGKPTNHKVFGEGTAVLAGDALLSFAFEHIAVSTSKTVESDRVLRVVSELGRAIGSEGVAGGQVADITSQGNPSVGLETLEWIHIHKTAVLLECSVASGAIIGGASDDEIERVRKYARCVGLLFQVVDDILDVTKSSEELGKTAAKDLLSDKATYPKLMGLEKAKEFADELLGKAKEELSFFNPTKAAPLLGLADYIAQRQN

SEQ ID NO: 24 - protein, 319 aa, Picea abies
MLRCSNTNAQLANLSEQVKGKVTEFDFKEYMRSKAMSVNEALDRAVPLRYPEKIHEAMRYSLLAGGKRVRPILCIAACELVGGSEELAMPTACAMEIIHTYSLIHDDLPPMDNDDLRRGKPTNHKVFGEGTAVLAGDALLSFAFEHIAVSTSKTVESDRVLRVVSELGRAIGSEGVAGGQVADITSQGNPSVGLETLEWIHIHKTAVLLECSVASGAIIGGASDDEIERVRKYARCVGLLFQVVDDILDVTKSSEELGKTAAKDLLSDKATYPKLMGLEKAKEFADELLGKAKEELSFFNPTKAAPLLGLADYIAQRQN

SEQ ID NO: 25 - protein, 353 aa, Sus scrofa
MNGDQKLDAYARERQDFIQHFSQIVKVLTEEDIGHPEIGDAVARLKEVLEYNVVGGKYNRGITVLVVFRELVEPRKQDADSLQRALTVGWCIELLQAFFLVADDIEDSSLTRRGQTCWYRKPGIGLDAINDAFLLEACIYRLLKFYCREQPYYLNLIELFLQTSYNTEIGQTLDLIAGPQGNVDLSRFTEKRYKSIVKYKTAFYSFYLPVAAAMYMAGIDGEKEHANAKKILMEMGEFFQIQDDYLDLFGDPSVTGKIGTDIQDNKCSWLVVQCLQRASPEQRQILQENYGQKDAEKVARVKALYEEMNLQAVFLQYEEDSYSHLMGLIEQYAAPLPPAIFLELAHKIYKRRK

SEQ ID NO: 26 - protein, 353 aa, Acyrthosiphon pisum
MPVITGTAVSKDETRDFMAVFPDVVRDLTDTGRNLDVPDVTKWLAKLLQYNVPGGKKNRGLALVLSYKMLSSPADQTDENIRLSYILGWCVEILQAYQLVLDDIMDNAITRRGRPCWYRHNDIGLMAVNDGVLLEQSIYQLIKKYFKDKPYYTHILELFYDVTMKTSMGQCLDMLTANSFKSKKLEKYTMENYTAIVKYKTAYYSFFLPVCLAMRMTNINDPEIFRQAKTILLEMGHFFQVQDDFLDCYGDPDVMGKIGTDIEDGKCSWLAVVALQKVNSEQKKIMEDNYGIDNPANVAVIKDLYAQLKLPDTFHLYEEESYKLICTHIQQLSRGLSQDMFFKFLEKIYKRTL

SEQ ID NO: 27 - protein, 359 aa, Mycobacterium tuberculosis
MRGTDEKYGLPPQPDSDRMTRRTLPVLGLAHELITPTLRQMADRLDPHMRPVVSYHLGWSDERGRPVNNNCGKAIRPALVFVAAEAAGADPHSAIPGAVSVELVHNFSLVHDDLMDRDEHRRHRPTVWALWGDAMALLAGDAMLSLAHEVLLDCDSPHVGAALRAISEATRELIRGQAADTAFESRTDVALDECLKMAEGKTAALMAASAEVGALLAGAPRSVREALVAYGRHIGLAFQLVDDLLGIWGRPEITGKPVYSDLRSRKKTLPVTWTVAHGGLAGRRLAAWLVDETGSQTASDDELAAVAELIECGGGRRWASAEARRHVTQGIDMVARIGIPDRPAAELQDLAHYIVDRQA

SEQ ID NO: 28 - protein, 293 aa, Staphylococcus aureus
MTNLPMNKLIDEVNNELSVAINKSVMDTQLEESMLYSLNAGGKRIRPVLLLLTLDSLNTEYELGMKSAIALEMIHTYSLIHDDLPAMDNDDYRRGKLTNHKVYGEWTAILAGDALLTKAFELISSDDRLTDEVKIKVLQRLSIASGHVGMVGGQMLDMQSEGQPIDLETLEMIHKTKTGALLTFAVMSAADIANVDDTTKEHLESYSYHLGMMFQIKDDLLDCYGDEAKLGKKVGSDLENNKSTYVSLLGKDGAEDKLTYHRDAAVDELTQIDEQFNTKHLLEIVDLFYSRDH

SEQ ID NO: 29 - protein, 297 aa, Geobacillus sp. WSUCF1
MAQLSVEQFLNEQKRAVEAALSSYMARLRGPETLKKAMAYSLEAGGKRIRPLLLLATIQALGKDPAIGLPVACAIEMIHTYSLIHDDLPSMDNDDLRRGKPTNHKVFGEAMAILAGDALLTYAFQLIAEVDDDRVPPSVRLQLIEQLAKAAGPEGMVAGQAADMEAEGKTLALAELEYIHRHGTGKMLQYSVHAGALLGGADGRQTRELNEFAAHLGLAFQIRDDILDIEGMEEKIGKRVGSDRDNKKATYPVLLSLGGAKEKLAFHIDAAKRHLQQAKIDDAVLAYICELVAVRDH

SEQ ID NO: 30 - protein, 352 aa, Saccharomy cescerevisiae; identical to SEQ ID NO: 7

SEQ ID NO: 31 - protein, 347 aa, Neosartorya fumigata
MATTTSRAAFEAVFPTLAEDLLAHAKKYNLPENAVKWFEQVLNVNVPGGKLNRGLSVPDTGIALLQKPLTDEQFKHLSILGWLTELLQAFFLVSDDMMDSSITRRGQPCWYRHPGVGLIAINDAFMLESGIYVILKKHFRSHPAYVDFLELFHETTWQTELGQLCDLITAPEDKVDLDNFSMEKYMFIVTYGTAYYSFYLPVALALLYLELATPENLQQTHDILIPLGQYFQVQDDYLDAYGDPAVIGKIGTDIQDNKCSWLINQALQRCNTEQRKLLDTAYGRKDSELEAKVKALYKELDLEKVYKEYEEKTVGEIRRKIAAIDESQGLKKEVFEAFLGKIYKRTK

SEQ ID NO: 32 - protein, 347 aa, Neosartorya fumigata
MATTTSRAAFEAVFPTLAEDLLAHAKKYNLPENAVKWFEQVLNVNVPGGKLNRGLSVPDTGIALLQKPLTDEQFKHLSILGWLTELLQAFWLVSDDMMDSSITRRGQPCWYRHPGVGLIAIWDAFMLESGIYVILKKHFRSHPAYVDFLELFHETTWQTELGQLCDLITAPEDKVDLDNFSMEKYMFIVTYKTAYYSFYLPVALALLYLELATPENLQQTHDILIPLGQYFQVQDDYLDAYGDPAVIGKIGTDIQDNKCSWLINQALQRCNTEQRKLLDTAYGRKDSELEAKVKALYKELDLEKVYKEYEEKTVGEIRRKIAAIDESQGLKKEVFEAFLGKIYKRTK

SEQ ID NO: 33 - protein, 365 aa, Catharanthus roseus
MCVSSALANVGQQVQRQSNSVAEEPLDPFSLVADELSILANRLRSMVVAEVPKLASAAEYFFKLGVEGKRFRPTVLLLMATAIDAPISRTPPDTSLDTLSTELRLRQQSIAEITEMIHVASLLHDDVLDDAETRRGIGSLNFVMGNKLAVLAGDFLLSRACVALASLKNTEVVSLLATVVEHLVTGETMQMTTTSDQRCSMEYYMQKTYYGTASLISNSCKAIALLAGQTSEVAMLAYEYGKNLGLAFQLIDDVLDFTGTSASLGKGSLSDIRHGIVTAPILFAIEEFPELRAVVDEGFENPYNVDLALHYLGKSRGIQRTRELAIKHANLASDAIDSLPVTDDEHVLRSRRALVELTQRVITRR

SEQ ID NO: 34 - protein, 304 aa, Rhizobium acidisoli
MDANRDTFETRLKNNAREIEALLDALLLPNALSDEIARPETLRSAMHYAVLNGGKRLRPFLVVESAALLGGDDEAARRVGAALECVHCYSLVHDDLPAMDDDDLRRGKPTVHIKFDEATAILAGDSLLTYAFDIIAAPETALADTSKASLVLALARAAGLGGMAGGQALDLAAEKQAPDEAGIIRLQAMGTGALIRFACEAGALIAASPPEDRRRLRAFGEKIGLAFQLADDILDLTSDTATMGKATGKDAARGKGTLVALHGIEWAEEQLRQHVRDAEALLAPYGARASTLIAAAHFIADRKS

SEQ ID NO: 35 - protein, 299 aa, Escherichia coli; identical to SEQ ID NO: 14

SEQ ID NO: 36 - protein, 304 aa, Brucella suis
MEKLPVDFTTLLNRRAMEVEAALAGLLDECPRTGEIARPQRLIAAMRHGVLNGGKRLRPFLVLESAALFGQYGQAVLRVAAALECIHCYSLVHDDLPAMDDDDLRRGQPTVHKAFDEAAAILAGDSLLTYAFDIIASDETELDATTRIKLVCALTRASGLGGMAGGQALDLMAETRKPDEAGIITLQAMGTGALIRFACEAGAIIAGASQEDRERMAEFGSAIGLAFQLADDLLDVTADAGTMGKATGKDAAAGKATLVSLHGIDWTRQQLSGLVAQAESLLAPFGEDAEPLKQAARFIAERQN

SEQ ID NO: 37 - protein, 339 aa, Arabidopsis thaliana
MFSLVADELSLLSNKLREMVLAEVPKLASAAEYFFKRGVQGKQFRSTILLLMATALNVRVPEALIGESTDIVTSELRVRQRGIAEITEMIHVASLLHDDVLDDADTRRGVGSLNVVMGNKMSVLAGDFLLSRACGALAALKNTEVVALLATAVEHLVTGETMEITSSTEQRYSMDYYMQKTYYGTASLISNSCKAVAVLTGQTAEVAVLAFEYGRNLGLAFQLIDDILDFTGTSASLGKGSLSDIRHGVITAPILFAMEEFPQLREVVDQVEKDPRNVDIALEYLGKSKGIQRARELAMEHANLAAAAIGSLPETDNEDVKRSRRALIDLTHRVITRNK

SEQ ID NO: 38 - protein, 282 aa, Buchnera aphidicola
MHFFHLYERYKHRINQKLFYTLNQLPFQKSSLLKAMKYSVFSGSKRLRSSLIYSTGDVFKVNITTLDVISTAIEFIHSYSLIHDDLPCMDNDNFRRGKISCHVKYGESTSLLAGDALQSLAFNILSNSFMPNVSNLKRIKMISELSYSIGSSGMCMGQNLDLEAEKKDVNLSELEIINLYGTSFLMRSAVRLVYFSSNNFSKSILSILDLFSISIGLAFQIQDDILDFKKDSVKTDNKKIIKKHTYPLIIGLDESRKKIKQLHKKSFLALNSLKKKISIPTY

SEQ ID NO: 39 - protein, 355 aa, Dendroctonus ponderosae
MIRPVQSSALVTKEQSRDFMALFPDLVRELTEVGKSQELPDVMRRFARVLQYNTPTGKKNRGLIVLSTYRMLEDPEKLTPENIRLASILGWCVEMVHAYFLILDDIMDGSETRRGALCWFRQSGIGLTAVNDAVMIENAVYLLIKRHLKDHPMYVPLMELFHEGNLKTTLGQSLDAMCLDTNGKPKLDMFTMSRYTSIVKYGTAFYSFQMPVAIAMYLAGMSDEEQHRQAKTILMEMGQFFQIQDDFLDCFGDPTVTGKVGTDIQDGKCSWLAVVALQRASPAQRKIMEEHYGRPEPESIARIKNLYVDLCLPNTYAIYEEESFNIIKTHIQQISKGLRHDLFFKIMEKIYKREC

SEQ ID NO: 40 - protein, 314 aa, Picea abies
MKALVQLADLSEQVKNVVEFDFDKYMHSKAIAVNEALDKVIPPRYPQKIYESMRYSLLAGGKRVRPILCIAACELMGGTEELAMPTACAIEMIHTMSLIHDDLPYIDNDDLRRGKPTNHKVFGEDTAIIAGDALLSLAFEHVAVSTSRTLGTDIILRLLSEIGRATGSEGVMGGQVVDIESEGDPSIDLETLEWVHIHGTAVLLECSVVCGAIMGGASEDDIERARRYARCVGLLFQVVDDILDVSQSSEELGKTAGKDLISDKATYPKLMGLEKAKEFADELLNRGKQELSCFDPTKAAPLFALADYIASRQN

SEQ ID NO: 41 - protein, 300 aa, Abies grandis
MKAVEFDFNKYMDSKAMTVNEALNKAIPLRYPQKIYESMRYSLLAGGKRVRPVLCIAACELVGGTEELAIPTACAIEMIHTMSLMHDDLPCIDNDDLRRGKPTNHKIFGEDTAVTAGNALHSYAFEHIAVSTSKTVGADRILRMVSELGRATGSEGVMGGQMVDIASEGDPSIDLQTLEWIHIHGTAMLLECSVVCGAIIGGASEIVIERARRYARCVGLLFQVVDDILDVTKSSDELGKTAGKDLISDKATYPKLMGLEKAKEFSDELLNRAKGELSCFDPVKAAPLLGLADYVAFRQN

SEQ ID NO: 42 - protein, 371 aa, Corynebacterium glutamicum
MKDVSLSSFDAHDLDLDKFPEVVRDRLTQFLDAQELTIADIGAPVTDAVAHLRSFVLNGGKRIRPLYAWAGFLAAQGHKNSSEKLESVLDAAASLEFIQACALIHDDIIDSSDTRRGAPTVHRAVEADHRANNFEGDPEHFGVSVSILAGDMALVWAEDMLQDSGLSAEALARTRDAWRGMRTEVIGGQLLDIYLESHANESVELADSVNRFGTAAYTIARPLHLGASIAGGSPQLIDALLHYGHDIGIAFQLRDDLLGVFGDPAITGKPAGDDIREGKRTVLLALALQRADKQSPEAATAIRAGVGKVTSPEDIAVITEHIRATGAEEEVEQRISQLTESGLAHLDDVDIPDEVRAQLRALAIRSTERRM

SEQ ID NO: 43 - protein, 347 aa, Vitis vinifera
MLAEEQLDPFSLVADELSLLADRLRSMVVAEVPKLASAAEYFFKMGVEGKRFRPTVLLLMATALNVPLPRPALAEVPETLSTELRTRQQCIAEITEMIHVASLLHDDVLDDAETRRGIGSLNIMMGNKVAVLAGDFLLSRACVALASLKNTEVVSLLATVVEHLVTGETMQMTSTSEQRVSMEYYLQKTYYGTASLISNSCKAIALLAGQTAEVSMLAFEYGKNLGLAFQLIDDVLDFTGTSASLGKGSLSDIRHGIITAPILFAIEEFPQLDAVVKRGLDNPADIDLALDYLGKSRGIQRTRELAMKHANLAAEAIDSLPESGDEDVLRSRRALIDLTHRVITRTK

SEQ ID NO: 44 - protein, 319 aa, Picea abies
MLRCSNTNAQLANLSEQVKGKVTEFDFKEYMRSKAMSVNEALDRAVPLRYPEKIHEAMRYSLLAGGKRVRPILCIAACELVGGSEELAMPTACAMEIIHTMSLIHDDLPCIDNDDLRRGKPTNHKVFGEGTAVLAGDALLSFAFEHIAVSTSKTVESDRVLRVVSELGRAIGSEGVAGGQVADITSQGNPSVGLETLEWIHIHKTAVLLECSVASGAIIGGASDDEIERVRKYARCVGLLFQVVDDILDVTKSSEELGKTAAKDLLSDKATYPKLMGLEKAKEFADELLGKAKEELSFFNPTKAAPLLGLADYIAQRQN

SEQ ID NO: 45 - protein, 319 aa, Picea abies
MLRCSNTNAQLANLSEQVKGKVTEFDFKEYMRSKAMSVNEALDRAVPLRYPEKIHEAMRYSLLAGGKRVRPILCIAACELVGGSEELAMPTACAMEIIHTMSLIHDDLPPMDNDDFRRGKPTNHKVFGEGTAVLAGDALLSFAFEHIAVSTSKTVESDRVLRVVSELGRAIGSEGVAGGQVADITSQGNPSVGLETLEWIHIHKTAVLLECSVASGAIIGGASDDEIERVRKYARCVGLLFQVVDDILDVTKSSEELGKTAAKDLLSDKATYPKLMGLEKAKEFADELLGKAKEELSFFNPTKAAPLLGLADYIAQRQN

SEQ ID NO: 46 - protein, 319 aa, Picea abies
MLRCSNTNAQLANLSEQVKGKVTEFDFKEYMRSKAMSVNEALDRAVPLRYPEKIHEAMRYSLLAGGKRVRPILCIAACELVGGSEELAMPTACAMEIIHTMSLIHDDLPPMDNDDLRRGKPTNHKVFGEGTAVLAGDALLSFAFEHIAVSTSKTVESDRVLRVVSELGRAIGSEGVAGGQVADITSQGNPSVGLETLEWIHIHGTAVLLECSVASGAIIGGASDDEIERVRKYARCVGLLFQVVDDILDVTKSSEELGKTAAKDLLSDKATYPKLMGLEKAKEFADELLGKAKEELSFFNPTKAAPLLGLADYIAQRQN

SEQ ID NO: 47 - protein, 319 aa, Picea abies
MLRCSNTNAQLANLSEQVKGKVTEFDFKEYMRSKAMSVNEALDRAVPLRYPEKIHEAMRYSLLAGGKRVRPILCIAACELVGGSEELAMPTACAMEIIHTMSLIHDDLPPMDNDDLRRGKPTNHKVFGEGTAVLAGDALLSFAFEHIAVSTSKTVESDRVLRVVSELGRAIGSEGVAGGQVADITSQGNPSVGLETLEWIHIHKTAVLFECSVASGAIIGGASDDEIERVRKYARCVGLLFQVVDDILDVTKSSEELGKTAAKDLLSDKATYPKLMGLEKAKEFADELLGKAKEELSFFNPTKAAPLLGLADYIAQRQN

SEQ ID NO: 48 - protein, 319 aa, Picea abies
MLRCSNTNAQLANLSEQVKGKVTEFDFKEYMRSKAMSVNEALDRAVPLRYPEKIHEAMRYSLLAGGKRVRPILCIAACELVGGSEELAMPTACAMEIIHTMSLIHDDLPPMDNDDLRRGKPTNHKVFGEGTAVLAGDALLSFAFEHIAVSTSKTVESDRVLRVVSELGRATGSEGVAGGQVADITSQGNPSVGLETLEWIHIHKTAVLLECSVASGAIIGGASDDEIERVRKYARCVGLLFQVVDDILDVTKSSEELGKTAAKDLLSDKATYPKLMGLEKAKEFADELLGKAKEELSFFNPTKAAPLLGLADYIAQRQN

SEQ ID NO: 49 - protein, 353 aa, Sus scrofa
MNGDQKLDAYARERQDFIQHFSQIVKVLTEEDIGHPEIGDAVARLKEVLEYNVVGGKYNRGITVLVVFRELVEPRKQDADSLQRALTVGWCIELLQAFFLVADDIEDSSLTRRGQTCWYRKPGIGLDAINDAFLLEACIYRLLKFYCREQPYYLNLIELFLQTSYNTEIGQTLDLIAGPQGNVDLSRFTEKRYKSIVKYGTAFYSFYLPVAAAMYMAGIDGEKEHANAKKILMEMGEFFQIQDDYLDLFGDPSVTGKIGTDIQDNKCSWLVVQCLQRASPEQRQILQENYGQKDAEKVARVKALYEEMNLQAVFLQYEEDSYSHLMGLIEQYAAPLPPAIFLELAHKIYKRRK

SEQ ID NO: 50 - protein, 353 aa, Acyrthosiphon pisum
MPVITGTAVSKDETRDFMAVFPDVVRDLTDTGRNLDVPDVTKWLAKLLQYNVPGGKKNRGLALVLSYKMLSSPADQTDENIRLSYILGWCVEILQAYQLVLDDIMDNAITRRGRPCWYRHNDIGLMAVNDGVLLEQSIYQLIKKYFKDKPYYTHILELFYDVTMKTSMGQCLDMLTANSFKSKKLEKYTMENYTAIVKYGTAYYSFFLPVCLAMRMTNINDPEIFRQAKTILLEMGHFFQVQDDFLDCYGDPDVMGKIGTDIEDGKCSWLAVVALQKVNSEQKKIMEDNYGIDNPANVAVIKDLYAQLKLPDTFHLYEEESYKLICTHIQQLSRGLSQDMFFKFLEKIYKRTL

SEQ ID NO: 51 - protein, 359 aa, Mycobacterium tuberculosis
MRGTDEKYGLPPQPDSDRMTRRTLPVLGLAHELITPTLRQMADRLDPHMRPVVSYHLGWSDERGRPVNNNCGKAIRPALVFVAAEAAGADPHSAIPGAVSVELVHNFSLVHDDLMDRDEHRRHRPTVWALWGDAMALLAGDAMLSLAHEVLLDCDSPHVGAALRAISEATRELIRGQAADTAFESRTDVALDECLKMAEGGTAALMAASAEVGALLAGAPRSVREALVAYGRHIGLAFQLVDDLLGIWGRPEITGKPVYSDLRSRKKTLPVTWTVAHGGLAGRRLAAWLVDETGSQTASDDELAAVAELIECGGGRRWASAEARRHVTQGIDMVARIGIPDRPAAELQDLAHYIVDRQA

SEQ ID NO: 52 - protein, 293 aa, Staphylococcus aureus
MTNLPMNKLIDEVNNELSVAINKSVMDTQLEESMLYSLNAGGKRIRPVLLLLTLDSLNTEYELGMKSAIALEMIHTYSLIHDDLPAMDNDDYRRGKLTNHKVYGEWTAILAGDALLTKAFELISSDDRLTDEVKIKVLQRLSIASGHVGMVGGQMLDMQSEGQPIDLETLEMIHKTGTGALLTFAVMSAADIANVDDTTKEHLESYSYHLGMMFQIKDDLLDCYGDEAKLGKKVGSDLENNKSTYVSLLGKDGAEDKLTYHRDAAVDELTQIDEQFNTKHLLEIVDLFYSRDH

SEQ ID NO: 53 - protein, 297 aa, Geobacillus sp. WSUCF1
MAQLSVEQFLNEQKRAVEAALSSYMARLRGPETLKKAMAYSLEAGGKRIRPLLLLATIQALGKDPAIGLPVACAIEMIHTYFLIHDDLPCIDNDDLRRGKPTNHKVFGEAMAILAGDALLTYAFQLIAEVDDDRVPPSVRLQLIEQLAKAAGPEGMVAGQAADMEAEGKTLALAELEYIHRHKTGKMLQYSVHAGALLGGADGRQTRELNEFAAHLGLAFQIRDDILDIEGMEEKIGKRVGSDRDNKKATYPVLLSLGGAKEKLAFHIDAAKRHLQQAKIDDAVLAYICELVAVRDH

SEQ ID NO: 54 - protein, 297 aa, Geobacillus sp. WSUCF1
MAQLSVEQFLNEQKRAVEAALSSYMARLRGPETLKKAMAYSLEAGGKRIRPLLLLATIQALGKDPAIGLPVACAIEMIHTYSLIHDDLPCIDNDDLRRGKPTNHKVFGEAMAILAGDALLTYAFQLIAEVDDDRVPPSVRLQLIEQLAKAAGPEGMVAGQAADMEAEGKTLALAELEYIHRHKTGKMLQYSVHAGALLGGADGRQTRELNEFAAHLGLAFQIRDDILDIEGMEEKIGKRVGSDRDNKKATYPVLLSLGGAKEKLAFHIDAAKRHLQQAKIDDAVLAYICELVAVRDH

SEQ ID NO: 55 - protein, 297 aa, Geobacillus sp. WSUCF1
MAQLSVEQFLNEQKRAVEAALSSYMARLRGPETLKKAMAYSLEAGGKRIRPLLLLATIQALGKDPAIGLPVACAIEMIHTYSLIHDDLPSMDNDDFRRGKPTNHKVFGEAMAILAGDALLTYAFQLIAEVDDDRVPPSVRLQLIEQLAKAAGPEGMVAGQAADMEAEGKTLALAELEYIHRHKTGKMLQYSVHAGALLGGADGRQTRELNEFAAHLGLAFQIRDDILDIEGMEEKIGKRVGSDRDNKKATYPVLLSLGGAKEKLAFHIDAAKRHLQQAKIDDAVLAYICELVAVRDH

SEQ ID NO: 56 - protein, 297 aa, Geobacillus sp. WSUCF1
MAQLSVEQFLNEQKRAVEAALSSYMARLRGPETLKKAMAYSLEAGGKRIRPLLLLATIQALGKDPAIGLPVACAIEMIHTYSLIHDDLPSMDNDDLRRGKPTNHKVFGEAMAILAGDALLTYAFQLIAEVDDDRVPPSVRLQLIEQLAKAAGPEGMVAGQAADMEAEGKTLALAELEYIHRHKTGKMFQYSVHAGALLGGADGRQTRELNEFAAHLGLAFQIRDDILDIEGMEEKIGKRVGSDRDNKKATYPVLLSLGGAKEKLAFHIDAAKRHLQQAKIDDAVLAYICELVAVRDH

SEQ ID NO: 57 - protein, 304 aa, Rhizobium acidisoli
MDANRDTFETRLKNNAREIEALLDALLLPNALSDEIARPETLRSAMHYAVLNGGKRLRPFLVVESAALLGGDDEAARRVGAALECVHCYFLVHDDLPCIDDDDLRRGKPTVHIKFDEATAILAGDSLLTYAFDIIAAPETALADTSKASLVLALARAAGLGGMAGGQALDLAAEKQAPDEAGIIRLQAMKTGALIRFACEAGALIAASPPEDRRRLRAFGEKIGLAFQLADDILDLTSDTATMGKATGKDAARGKGTLVALHGIEWAEEQLRQHVRDAEALLAPYGARASTLIAAAHFIADRKS

SEQ ID NO: 58 - protein, 304 aa, Rhizobium acidisoli
MDANRDTFETRLKNNAREIEALLDALLLPNALSDEIARPETLRSAMHYAVLNGGKRLRPFLVVESAALLGGDDEAARRVGAALECVHCYSLVHDDLPAMDDDDFRRGKPTVHIKFDEATAILAGDSLLTYAFDIIAAPETALADTSKASLVLALARAAGLGGMAGGQALDLAAEKQAPDEAGIIRLQAMKTGALIRFACEAGALIAASPPEDRRRLRAFGEKIGLAFQLADDILDLTSDTATMGKATGKDAARGKGTLVALHGIEWAEEQLRQHVRDAEALLAPYGARASTLIAAAHFIADRKS

SEQ ID NO: 59 - protein, 304 aa, Rhizobium acidisoli
MDANRDTFETRLKNNAREIEALLDALLLPNALSDEIARPETLRSAMHYAVLNGGKRLRPFLVVESAALLGGDDEAARRVGAALECVHCYSLVHDDLPCIDDDDLRRGKPTVHIKFDEATAILAGDSLLTYAFDIIAAPETALADTSKASLVLALARAAGLGGMAGGQALDLAAEKQAPDEAGIIRLQAMKTGALIRFACEAGALIAASPPEDRRRLRAFGEKIGLAFQLADDILDLTSDTATMGKATGKDAARGKGTLVALHGIEWAEEQLRQHVRDAEALLAPYGARASTLIAAAHFIADRKS

SEQ ID NO: 60 - protein, 299 aa, Escherichia coli
MDFPQQLEACVKQANQALSRFIAPLPFQNTPVVETMQYGALLGGKRLRPFLVYATGHMFGVSTNTLDAPAAAVECIHAYFLIHDDLPCIDDDDLRRGLPTCHVKFGEANAILAGDALQTLAFSILSDADMPEVSDRDRISMISELASASGIAGMCGGQALDLDAEGKHVPLDALERIHRHKTGALIRAAVRLGALSAGDKGRRALPVLDKYAESIGLAFQVQDDILDVVGDTATLGKRQGADQQLGKSTYPALLGLEQARKKARDLIDDARQSLKQLAEQSLDTSALEALADYIIQRNK

SEQ ID NO: 61 - protein, 299 aa, Escherichia coli
MDFPQQLEACVKQANQALSRFIAPLPFQNTPVVETMQYGALLGGKRLRPFLVYATGHMFGVSTNTLDAPAAAVECIHAYSLIHDDLPAMDDDDFRRGLPTCHVKFGEANAILAGDALQTLAFSILSDADMPEVSDRDRISMISELASASGIAGMCGGQALDLDAEGKHVPLDALERIHRHKTGALIRAAVRLGALSAGDKGRRALPVLDKYAESIGLAFQVQDDILDVVGDTATLGKRQGADQQLGKSTYPALLGLEQARKKARDLIDDARQSLKQLAEQSLDTSALEALADYIIQRNK

SEQ ID NO: 62 - protein, 299 aa, Escherichia coli
MDFPQQLEACVKQANQALSRFIAPLPFQNTPVVETMQYGALLGGKRLRPFLVYATGHMFGVSTNTLDAPAAAVECIHAYSLIHDDLPCIDDDDLRRGLPTCHVKFGEANAILAGDALQTLAFSILSDADMPEVSDRDRISMISELASASGIAGMCGGQALDLDAEGKHVPLDALERIHRHKTGALIRAAVRLGALSAGDKGRRALPVLDKYAESIGLAFQVQDDILDVVGDTATLGKRQGADQQLGKSTYPALLGLEQARKKARDLIDDARQSLKQLAEQSLDTSALEALADYIIQRNK

SEQ ID NO: 63 - protein, 304 aa, Brucella suis
MEKLPVDFTTLLNRRAMEVEAALAGLLDECPRTGEIARPQRLIAAMRHGVLNGGKRLRPFLVLESAALFGQYGQAVLRVAAALECIHCYFLVHDDLPCIDDDDLRRGQPTVHKAFDEAAAILAGDSLLTYAFDIIASDETELDATTRIKLVCALTRASGLGGMAGGQALDLMAETRKPDEAGIITLQAMKTGALIRFACEAGAIIAGASQEDRERMAEFGSAIGLAFQLADDLLDVTADAGTMGKATGKDAAAGKATLVSLHGIDWTRQQLSGLVAQAESLLAPFGEDAEPLKQAARFIAERQN

SEQ ID NO: 64 - protein, 304 aa, Brucella suis
MEKLPVDFTTLLNRRAMEVEAALAGLLDECPRTGEIARPQRLIAAMRHGVLNGGKRLRPFLVLESAALFGQYGQAVLRVAAALECIHCYSLVHDDLPCIDDDDLRRGQPTVHKAFDEAAAILAGDSLLTYAFDIIASDETELDATTRIKLVCALTRASGLGGMAGGQALDLMAETRKPDEAGIITLQAMKTGALIRFACEAGAIIAGASQEDRERMAEFGSAIGLAFQLADDLLDVTADAGTMGKATGKDAAAGKATLVSLHGIDWTRQQLSGLVAQAESLLAPFGEDAEPLKQAARFIAERQN

SEQ ID NO: 65 - protein, 282 aa, Buchnera aphidicola
MHFFHLYERYKHRINQKLFYTLNQLPFQKSSLLKAMKYSVFSGSKRLRSSLIYSTGDVFKVNITTLDVISTAIEFIHSYFLIHDDLPCIDNDNFRRGKISCHVKYGESTSLLAGDALQSLAFNILSNSFMPNVSNLKRIKMISELSYSIGSSGMCMGQNLDLEAEKKDVNLSELEIINLYKTSFLMRSAVRLVYFSSNNFSKSILSILDLFSISIGLAFQIQDDILDFKKDSVKTDNKKIIKKHTYPLIIGLDESRKKIKQLHKKSFLALNSLKKKISIPTY

SEQ ID NO: 66 - protein, 282 aa, Buchnera aphidicola; identical to SEQ ID NO: 65

SEQ ID NO: 67 - protein, 282 aa, Buchnera aphidicola
MHFFHLYERYKHRINQKLFYTLNQLPFQKSSLLKAMKYSVFSGSKRLRSSLIYSTGDVFKVNITTLDVISTAIEFIHSYSLIHDDLPCMDNDNFRRGKISCHVKYGESTSLLAGDALQSLAFNILSNSFMPNVSNLKRIKMISELSYSTGSSGMCMGQNLDLEAEKKDVNLSELEIINLYKTSFLMRSAVRLVYFSSNNFSKSILSILDLFSISIGLAFQIQDDILDFKKDSVKTDNKKIIKKHTYPLIIGLDESRKKIKQLHKKSFLALNSLKKKISIPTY

SEQ ID NO: 68 - protein, 355 aa, Dendroctonus ponderosae
MIRPVQSSALVTKEQSRDFMALFPDLVRELTEVGKSQELPDVMRRFARVLQYNTPTGKKNRGLIVLSTYRMLEDPEKLTPENIRLASILGWCVEMVHAYWLILDDIMDGSETRRGALCWFRQSGIGLTAVWDAVMIENAVYLLIKRHLKDHPMYVPLMELFHEGNLKTTLGQSLDAMCLDTNGKPKLDMFTMSRYTSIVKYKTAFYSFQMPVAIAMYLAGMSDEEQHRQAKTILMEMGQFFQIQDDFLDCFGDPTVTGKVGTDIQDGKCSWLAVVALQRASPAQRKIMEEHYGRPEPESIARIKNLYVDLCLPNTYAIYEEESFNIIKTHIQQISKGLRHDLFFKIMEKIYKREC

SEQ ID NO: 69 - protein, 314 aa, Picea abies
MKALVQLADLSEQVKNVVEFDFDKYMHSKAIAVNEALDKVIPPRYPQKIYESMRYSLLAGGKRVRPILCIAACELMGGTEELAMPTACAIEMIHTISLIHDDLPYIDNDDLRRGKPTNHKVFGEDTAIIAGDALLSLAFEHVAVSTSRTLGTDIILRLLSEIGRATGSEGVMGGQVVDIESEGDPSIDLETLEWVHIHKTAVLLECSVVCGAIMGGASEDDIERARRYARCVGLLFQVVDDILDVSQSSEELGKTAGKDLISDKATYPKLMGLEKAKEFADELLNRGKQELSCFDPTKAAPLFALADYIASRQN

SEQ ID NO: 70 - protein, 314 aa, Picea abies
MKALVQLADLSEQVKNVVEFDFDKYMHSKAIAVNEALDKVIPPRYPQKIYESMRYSLLAGGKRVRPILCIAACELMGGTEELAMPTACAIEMIHTMSLIHDDLPYIDNDDFRRGKPTNHKVFGEDTAIIAGDALLSLAFEHVAVSTSRTLGTDIILRLLSEIGRATGSEGVMGGQVVDIESEGDPSIDLETLEWVHIHKTAVLLECSVVCGAIMGGASEDDIERARRYARCVGLLFQVVDDILDVSQSSEELGKTAGKDLISDKATYPKLMGLEKAKEFADELLNRGKQELSCFDPTKAAPLFALADYIASRQN

SEQ ID NO: 71 - protein, 314 aa, Picea abies
MKALVQLADLSEQVKNVVEFDFDKYMHSKAIAVNEALDKVIPPRYPQKIYESMRYSLLAGGKRVRPILCIAACELMGGTEELAMPTACAIEMIHTMSLIHDDLPYIDNDDLRRGKPTNHKVFGEDTAIIAGDALLSLAFEHVAVSTSRTLGTDIILRLLSEIGRATGSEGVMGGQVVDIESEGDPSIDLETLEWVHIHKTAVLFECSVVCGAIMGGASEDDIERARRYARCVGLLFQVVDDILDVSQSSEELGKTAGKDLISDKATYPKLMGLEKAKEFADELLNRGKQELSCFDPTKAAPLFALADYIASRQN

SEQ ID NO: 72 - protein, 300 aa, Abies grandis
MKAVEFDFNKYMDSKAMTVNEALNKAIPLRYPQKIYESMRYSLLAGGKRVRPVLCIAACELVGGTEELAIPTACAIEMIHTISLMHDDLPCIDNDDLRRGKPTNHKIFGEDTAVTAGNALHSYAFEHIAVSTSKTVGADRILRMVSELGRATGSEGVMGGQMVDIASEGDPSIDLQTLEWIHIHKTAMLLECSVVCGAIIGGASEIVIERARRYARCVGLLFQVVDDILDVTKSSDELGKTAGKDLISDKATYPKLMGLEKAKEFSDELLNRAKGELSCFDPVKAAPLLGLADYVAFRQN

SEQ ID NO: 73 - protein, 300 aa, Abies grandis
MKAVEFDFNKYMDSKAMTVNEALNKAIPLRYPQKIYESMRYSLLAGGKRVRPVLCIAACELVGGTEELAIPTACAIEMIHTMSLMHDDLPCIDNDDFRRGKPTNHKIFGEDTAVTAGNALHSYAFEHIAVSTSKTVGADRILRMVSELGRATGSEGVMGGQMVDIASEGDPSIDLQTLEWIHIHKTAMLLECSVVCGAIIGGASEIVIERARRYARCVGLLFQVVDDILDVTKSSDELGKTAGKDLISDKATYPKLMGLEKAKEFSDELLNRAKGELSCFDPVKAAPLLGLADYVAFRQN

SEQ ID NO: 74 - protein, 300 aa, Abies grandis
MKAVEFDFNKYMDSKAMTVNEALNKAIPLRYPQKIYESMRYSLLAGGKRVRPVLCIAACELVGGTEELAIPTACAIEMIHTMSLMHDDLPCIDNDDLRRGKPTNHKIFGEDTAVTAGNALHSYAFEHIAVSTSKTVGADRILRMVSELGRATGSEGVMGGQMVDIASEGDPSIDLQTLEWIHIHKTAMLFECSVVCGAIIGGASEIVIERARRYARCVGLLFQVVDDILDVTKSSDELGKTAGKDLISDKATYPKLMGLEKAKEFSDELLNRAKGELSCFDPVKAAPLLGLADYVAFRQN

SEQ ID NO: 75 - protein, 319 aa, Picea abies
MLRCSNTNAQLANLSEQVKGKVTEFDFKEYMRSKAMSVNEALDRAVPLRYPEKIHEAMRYSLLAGGKRVRPILCIAACELVGGSEELAMPTACAMEIIHTMFLIHDDLPCIDNDDLRRGKPTNHKVFGEGTAVLAGDALLSFAFEHIAVSTSKTVESDRVLRVVSELGRAIGSEGVAGGQVADITSQGNPSVGLETLEWIHIHKTAVLLECSVASGAIIGGASDDEIERVRKYARCVGLLFQVVDDILDVTKSSEELGKTAAKDLLSDKATYPKLMGLEKAKEFADELLGKAKEELSFFNPTKAAPLLGLADYIAQRQN

SEQ ID NO: 76 - protein, 319 aa, Picea abies; identical to SEQ ID NO: 44

SEQ ID NO: 77 - protein, 319 aa, Picea abies; identical to SEQ ID NO: 45

SEQ ID NO: 78 - protein, 353 aa, Sus scrofa
MNGDQKLDAYARERQDFIQHFSQIVKVLTEEDIGHPEIGDAVARLKEVLEYNVVGGKYNRGITVLVVFRELVEPRKQDADSLQRALTVGWCIELLQAFWLVADDIEDSSLTRRGQTCWYRKPGIGLDAIWDAFLLEACIYRLLKFYCREQPYYLNLIELFLQTSYNTEIGQTLDLIAGPQGNVDLSRFTEKRYKSIVKYKTAFYSFYLPVAAAMYMAGIDGEKEHANAKKILMEMGEFFQIQDDYLDLFGDPSVTGKIGTDIQDNKCSWLVVQCLQRASPEQRQILQENYGQKDAEKVARVKALYEEMNLQAVFLQYEEDSYSHLMGLIEQYAAPLPPAIFLELAHKIYKRRK

SEQ ID NO: 79 - protein, 293 aa, Staphylococcus aureus
MTNLPMNKLIDEVNNELSVAINKSVMDTQLEESMLYSLNAGGKRIRPVLLLLTLDSLNTEYELGMKSAIALEMIHTYFLIHDDLPCIDNDDYRRGKLTNHKVYGEWTAILAGDALLTKAFELISSDDRLTDEVKIKVLQRLSIASGHVGMVGGQMLDMQSEGQPIDLETLEMIHKTKTGALLTFAVMSAADIANVDDTTKEHLESYSYHLGMMFQIKDDLLDCYGDEAKLGKKVGSDLENNKSTYVSLLGKDGAEDKLTYHRDAAVDELTQIDEQFNTKHLLEIVDLFYSRDH

SEQ ID NO: 80 - protein, 293 aa, Staphylococcus aureus
MTNLPMNKLIDEVNNELSVAINKSVMDTQLEESMLYSLNAGGKRIRPVLLLLTLDSLNTEYELGMKSAIALEMIHTYSLIHDDLPAMDNDDYRRGKLTNHKVYGEWTAILAGDALLTKAFELISSDDRLTDEVKIKVLQRLSIASGHVGMVGGQMLDMQSEGQPIDLETLEMIHKTKTGALFTFAVMSAADIANVDDTTKEHLESYSYHLGMMFQIKDDLLDCYGDEAKLGKKVGSDLENNKSTYVSLLGKDGAEDKLTYHRDAAVDELTQIDEQFNTKHLLEIVDLFYSRDH

SEQ ID NO: 81 - protein, 293 aa, Staphylococcus aureus
MTNLPMNKLIDEVNNELSVAINKSVMDTQLEESMLYSLNAGGKRIRPVLLLLTLDSLNTEYELGMKSAIALEMIHTYSLIHDDLPCIDNDDYRRGKLTNHKVYGEWTAILAGDALLTKAFELISSDDRLTDEVKIKVLQRLSIASGHVGMVGGQMLDMQSEGQPIDLETLEMIHKTKTGALLTFAVMSAADIANVDDTTKEHLESYSYHLGMMFQIKDDLLDCYGDEAKLGKKVGSDLENNKSTYVSLLGKDGAEDKLTYHRDAAVDELTQIDEQFNTKHLLEIVDLFYSRDH

SEQ ID NO: 82 - protein, 297 aa, Geobacillus sp. WSUCF1
MAQLSVEQFLNEQKRAVEAALSSYMARLRGPETLKKAMAYSLEAGGKRIRPLLLLATIQALGKDPAIGLPVACAIEMIHTYFLIHDDLPSMDNDDLRRGKPTNHKVFGEAMAILAGDALLTYAFQLIAEVDDDRVPPSVRLQLIEQLAKAAGPEGMVAGQAADMEAEGKTLALAELEYIHRHKTGKMLQYSVHAGALLGGADGRQTRELNEFAAHLGLAFQIRDDILDIEGMEEKIGKRVGSDRDNKKATYPVLLSLGGAKEKLAFHIDAAKRHLQQAKIDDAVLAYICELVAVRDH

SEQ ID NO: 83 - protein, 354 aa, Saccharomyces cerevisiae
MASEKEIRRERFLNVFPKLVEELNASLLAYGMPKEACDWYAHSLNYNTPGGKLNRGLSVVDTYAILSNKTVEQLGQEEYEKVAILGWCIELLQAYFLVADDMPCIDKSITRRGQPCWYKVPEVGEIAINDAFMLEAAIYKLLKSHFRNEKYYIDITELFHEVTFQTELGQLMDLITAPEDKVDLSKFSLKKHSFIVTFKTAYYSFYLPVALAMYVAGITDEKDLKQARDVLIPLGEYFQIQDDYLDCFGTPEQIGKIGTDIQDNKCSWVINKALELASAEQRKTLDENYGKKDSVAEAKCKKIFNDLKIEQLYHEYEESIAKDLKAKISQVDESRGFKADVLTAFLNKVYKRSK

SEQ ID NO: 84 - protein, 349 aa, Neosartorya fumigata
MATTTSRAAFEAVFPTLAEDLLAHAKKYNLPENAVKWFEQVLNVNVPGGKLNRGLSVPDTGIALLQKPLTDEQFKHLSILGWLTELLQAFFLVSDDMPCIDSSITRRGQPCWYRHPGVGLIAINDAFMLESGIYVILKKHFRSHPAYVDFLELFHETTWQTELGQLCDLITAPEDKVDLDNFSMEKYMFIVTYKTAYYSFYLPVALALLYLELATPENLQQTHDILIPLGQYFQVQDDYLDAYGDPAVIGKIGTDIQDNKCSWLINQALQRCNTEQRKLLDTAYGRKDSELEAKVKALYKELDLEKVYKEYEEKTVGEIRRKIAAIDESQGLKKEVFEAFLGKIYKRTK

SEQ ID NO: 85 - protein, 365 aa, Catharanthus roseus
MCVSSALANVGQQVQRQSNSVAEEPLDPFSLVADELSILANRLRSMVVAEVPKLASAAEYFFKLGVEGKRFRPTVLLLMATAIDAPISRTPPDTSLDTLSTELRLRQQSIAEITEMIHVAFLLHDDVLDDAETRRGIGSLNFVMGNKLAVLAGDFLLSRACVALASLKNTEVVSLLATVVEHLVTGETMQMTTTSDQRCSMEYYMQKTYYKTASLISNSCKAIALLAGQTSEVAMLAYEYGKNLGLAFQLIDDVLDFTGTSASLGKGSLSDIRHGIVTAPILFAIEEFPELRAVVDEGFENPYNVDLALHYLGKSRGIQRTRELAIKHANLASDAIDSLPVTDDEHVLRSRRALVELTQRVITRR

SEQ ID NO: 86 - protein, 367 aa, Catharanthus roseus
MCVSSALANVGQQVQRQSNSVAEEPLDPFSLVADELSILANRLRSMVVAEVPKLASAAEYFFKLGVEGKRFRPTVLLLMATAIDAPISRTPPDTSLDTLSTELRLRQQSIAEITEMIHVAFLLHDDVPCIDDAETRRGIGSLNFVMGNKLAVLAGDFLLSRACVALASLKNTEVVSLLATVVEHLVTGETMQMTTTSDQRCSMEYYMQKTYYKTASLISNSCKAIALLAGQTSEVAMLAYEYGKNLGLAFQLIDDVLDFTGTSASLGKGSLSDIRHGIVTAPILFAIEEFPELRAVVDEGFENPYNVDLALHYLGKSRGIQRTRELAIKHANLASDAIDSLPVTDDEHVLRSRRALVELTQRVITRR

SEQ ID NO: 87 - protein, 367 aa, Catharanthus roseus
MCVSSALANVGQQVQRQSNSVAEEPLDPFSLVADELSILANRLRSMVVAEVPKLASAAEYFFKLGVEGKRFRPTVLLLMATAIDAPISRTPPDTSLDTLSTELRLRQQSIAEITEMIHVASLLHDDVPCIDDAETRRGIGSLNFVMGNKLAVLAGDFLLSRACVALASLKNTEVVSLLATVVEHLVTGETMQMTTTSDQRCSMEYYMQKTYYKTASLISNSCKAIALLAGQTSEVAMLAYEYGKNLGLAFQLIDDVLDFTGTSASLGKGSLSDIRHGIVTAPILFAIEEFPELRAVVDEGFENPYNVDLALHYLGKSRGIQRTRELAIKHANLASDAIDSLPVTDDEHVLRSRRALVELTQRVITRR

SEQ ID NO: 88 - protein, 304 aa, Rhizobium acidisoli
MDANRDTFETRLKNNAREIEALLDALLLPNALSDEIARPETLRSAMHYAVLNGGKRLRPFLVVESAALLGGDDEAARRVGAALECVHCYFLVHDDLPAMDDDDLRRGKPTVHIKFDEATAILAGDSLLTYAFDIIAAPETALADTSKASLVLALARAAGLGGMAGGQALDLAAEKQAPDEAGIIRLQAMKTGALIRFACEAGALIAASPPEDRRRLRAFGEKIGLAFQLADDILDLTSDTATMGKATGKDAARGKGTLVALHGIEWAEEQLRQHVRDAEALLAPYGARASTLIAAAHFIADRKS

SEQ ID NO: 89 - protein, 299 aa, Escherichia coli; identical to SEQ ID NO: 13

SEQ ID NO: 90 - protein, 304 aa, Brucella suis
MEKLPVDFTTLLNRRAMEVEAALAGLLDECPRTGEIARPQRLIAAMRHGVLNGGKRLRPFLVLESAALFGQYGQAVLRVAAALECIHCYFLVHDDLPAMDDDDLRRGQPTVHKAFDEAAAILAGDSLLTYAFDIIASDETELDATTRIKLVCALTRASGLGGMAGGQALDLMAETRKPDEAGIITLQAMKTGALIRFACEAGAIIAGASQEDRERMAEFGSAIGLAFQLADDLLDVTADAGTMGKATGKDAAAGKATLVSLHGIDWTRQQLSGLVAQAESLLAPFGEDAEPLKQAARFIAERQN

SEQ ID NO: 91 - protein, 339 aa, Arabidopsis thaliana
MFSLVADELSLLSNKLREMVLAEVPKLASAAEYFFKRGVQGKQFRSTILLLMATALNVRVPEALIGESTDIVTSELRVRQRGIAEITEMIHVAFLLHDDVLDDADTRRGVGSLNVVMGNKMSVLAGDFLLSRACGALAALKNTEVVALLATAVEHLVTGETMEITSSTEQRYSMDYYMQKTYYKTASLISNSCKAVAVLTGQTAEVAVLAFEYGRNLGLAFQLIDDILDFTGTSASLGKGSLSDIRHGVITAPILFAMEEFPQLREVVDQVEKDPRNVDIALEYLGKSKGIQRARELAMEHANLAAAAIGSLPETDNEDVKRSRRALIDLTHRVITRNK

SEQ ID NO: 92 - protein, 341 aa, Arabidopsis thaliana
MFSLVADELSLLSNKLREMVLAEVPKLASAAEYFFKRGVQGKQFRSTILLLMATALNVRVPEALIGESTDIVTSELRVRQRGIAEITEMIHVAFLLHDDVPCIDDADTRRGVGSLNVVMGNKMSVLAGDFLLSRACGALAALKNTEVVALLATAVEHLVTGETMEITSSTEQRYSMDYYMQKTYYKTASLISNSCKAVAVLTGQTAEVAVLAFEYGRNLGLAFQLIDDILDFTGTSASLGKGSLSDIRHGVITAPILFAMEEFPQLREVVDQVEKDPRNVDIALEYLGKSKGIQRARELAMEHANLAAAAIGSLPETDNEDVKRSRRALIDLTHRVITRNK

SEQ ID NO: 93 - protein, 341 aa, Arabidopsis thaliana
MFSLVADELSLLSNKLREMVLAEVPKLASAAEYFFKRGVQGKQFRSTILLLMATALNVRVPEALIGESTDIVTSELRVRQRGIAEITEMIHVASLLHDDVPCIDDADTRRGVGSLNVVMGNKMSVLAGDFLLSRACGALAALKNTEVVALLATAVEHLVTGETMEITSSTEQRYSMDYYMQKTYYKTASLISNSCKAVAVLTGQTAEVAVLAFEYGRNLGLAFQLIDDILDFTGTSASLGKGSLSDIRHGVITAPILFAMEEFPQLREVVDQVEKDPRNVDIALEYLGKSKGIQRARELAMEHANLAAAAIGSLPETDNEDVKRSRRALIDLTHRVITRNK

SEQ ID NO: 94 - protein, 282 aa, Buchnera aphidicola
MHFFHLYERYKHRINQKLFYTLNQLPFQKSSLLKAMKYSVFSGSKRLRSSLIYSTGDVFKVNITTLDVISTAIEFIHSYFLIHDDLPCMDNDNFRRGKISCHVKYGESTSLLAGDALQSLAFNILSNSFMPNVSNLKRIKMISELSYSIGSSGMCMGQNLDLEAEKKDVNLSELEIINLYKTSFLMRSAVRLVYFSSNNFSKSILSILDLFSISIGLAFQIQDDILDFKKDSVKTDNKKIIKKHTYPLIIGLDESRKKIKQLHKKSFLALNSLKKKISIPTY

SEQ ID NO: 95 - protein, 357 aa, Dendroctonus ponderosae
MIRPVQSSALVTKEQSRDFMALFPDLVRELTEVGKSQELPDVMRRFARVLQYNTPTGKKNRGLIVLSTYRMLEDPEKLTPENIRLASILGWCVEMVHAYFLILDDIPCIDGSETRRGALCWFRQSGIGLTAVNDAVMIENAVYLLIKRHLKDHPMYVPLMELFHEGNLKTTLGQSLDAMCLDTNGKPKLDMFTMSRYTSIVKYKTAFYSFQMPVAIAMYLAGMSDEEQHRQAKTILMEMGQFFQIQDDFLDCFGDPTVTGKVGTDIQDGKCSWLAVVALQRASPAQRKIMEEHYGRPEPESIARIKNLYVDLCLPNTYAIYEEESFNIIKTHIQQISKGLRHDLFFKIMEKIYKREC

SEQ ID NO: 96 - protein, 314 aa, Picea abies
MKALVQLADLSEQVKNVVEFDFDKYMHSKAIAVNEALDKVIPPRYPQKIYESMRYSLLAGGKRVRPILCIAACELMGGTEELAMPTACAIEMIHTMFLIHDDLPYIDNDDLRRGKPTNHKVFGEDTAIIAGDALLSLAFEHVAVSTSRTLGTDIILRLLSEIGRATGSEGVMGGQVVDIESEGDPSIDLETLEWVHIHKTAVLLECSVVCGAIMGGASEDDIERARRYARCVGLLFQVVDDILDVSQSSEELGKTAGKDLISDKATYPKLMGLEKAKEFADELLNRGKQELSCFDPTKAAPLFALADYIASRQN

SEQ ID NO: 97 - protein, 300 aa, Abies grandis
MKAVEFDFNKYMDSKAMTVNEALNKAIPLRYPQKIYESMRYSLLAGGKRVRPVLCIAACELVGGTEELAIPTACAIEMIHTMFLMHDDLPCIDNDDLRRGKPTNHKIFGEDTAVTAGNALHSYAFEHIAVSTSKTVGADRILRMVSELGRATGSEGVMGGQMVDIASEGDPSIDLQTLEWIHIHKTAMLLECSVVCGAIIGGASEIVIERARRYARCVGLLFQVVDDILDVTKSSDELGKTAGKDLISDKATYPKLMGLEKAKEFSDELLNRAKGELSCFDPVKAAPLLGLADYVAFRQN

SEQ ID NO: 98 - protein, 373 aa, Corynebacterium glutamicum
MKDVSLSSFDAHDLDLDKFPEVVRDRLTQFLDAQELTIADIGAPVTDAVAHLRSFVLNGGKRIRPLYAWAGFLAAQGHKNSSEKLESVLDAAASLEFIQACALIHDDIPCIDSSDTRRGAPTVHRAVEADHRANNFEGDPEHFGVSVSILAGDMALVWAEDMLQDSGLSAEALARTRDAWRGMRTEVIGGQLLDIYLESHANESVELADSVNRFKTAAYTIARPLHLGASIAGGSPQLIDALLHYGHDIGIAFQLRDDLLGVFGDPAITGKPAGDDIREGKRTVLLALALQRADKQSPEAATAIRAGVGKVTSPEDIAVITEHIRATGAEEEVEQRISQLTESGLAHLDDVDIPDEVRAQLRALAIRSTERRM

SEQ ID NO: 99 - protein, 347 aa, Vitis vinifera
MLAEEQLDPFSLVADELSLLADRLRSMVVAEVPKLASAAEYFFKMGVEGKRFRPTVLLLMATALNVPLPRPALAEVPETLSTELRTRQQCIAEITEMIHVAFLLHDDVLDDAETRRGIGSLNIMMGNKVAVLAGDFLLSRACVALASLKNTEVVSLLATVVEHLVTGETMQMTSTSEQRVSMEYYLQKTYYKTASLISNSCKAIALLAGQTAEVSMLAFEYGKNLGLAFQLIDDVLDFTGTSASLGKGSLSDIRHGIITAPILFAIEEFPQLDAVVKRGLDNPADIDLALDYLGKSRGIQRTRELAMKHANLAAEAIDSLPESGDEDVLRSRRALIDLTHRVITRTK

SEQ ID NO: 100 - protein, 349 aa, Vitis vinifera
MLAEEQLDPFSLVADELSLLADRLRSMVVAEVPKLASAAEYFFKMGVEGKRFRPTVLLLMATALNVPLPRPALAEVPETLSTELRTRQQCIAEITEMIHVAFLLHDDVPCIDDAETRRGIGSLNIMMGNKVAVLAGDFLLSRACVALASLKNTEVVSLLATVVEHLVTGETMQMTSTSEQRVSMEYYLQKTYYKTASLISNSCKAIALLAGQTAEVSMLAFEYGKNLGLAFQLIDDVLDFTGTSASLGKGSLSDIRHGIITAPILFAIEEFPQLDAVVKRGLDNPADIDLALDYLGKSRGIQRTRELAMKHANLAAEAIDSLPESGDEDVLRSRRALIDLTHRVITRTK

SEQ ID NO: 101 - protein, 349 aa, Vitis vinifera
MLAEEQLDPFSLVADELSLLADRLRSMVVAEVPKLASAAEYFFKMGVEGKRFRPTVLLLMATALNVPLPRPALAEVPETLSTELRTRQQCIAEITEMIHVASLLHDDVPCIDDAETRRGIGSLNIMMGNKVAVLAGDFLLSRACVALASLKNTEVVSLLATVVEHLVTGETMQMTSTSEQRVSMEYYLQKTYYKTASLISNSCKAIALLAGQTAEVSMLAFEYGKNLGLAFQLIDDVLDFTGTSASLGKGSLSDIRHGIITAPILFAIEEFPQLDAVVKRGLDNPADIDLALDYLGKSRGIQRTRELAMKHANLAAEAIDSLPESGDEDVLRSRRALIDLTHRVITRTK

SEQ ID NO: 102 - protein, 319 aa, Picea abies
MLRCSNTNAQLANLSEQVKGKVTEFDFKEYMRSKAMSVNEALDRAVPLRYPEKIHEAMRYSLLAGGKRVRPILCIAACELVGGSEELAMPTACAMEIIHTMFLIHDDLPPMDNDDLRRGKPTNHKVFGEGTAVLAGDALLSFAFEHIAVSTSKTVESDRVLRVVSELGRAIGSEGVAGGQVADITSQGNPSVGLETLEWIHIHKTAVLLECSVASGAIIGGASDDEIERVRKYARCVGLLFQVVDDILDVTKSSEELGKTAAKDLLSDKATYPKLMGLEKAKEFADELLGKAKEELSFFNPTKAAPLLGLADYIAQRQN

SEQ ID NO: 103 - protein, 355 aa, Sus scrofa
MNGDQKLDAYARERQDFIQHFSQIVKVLTEEDIGHPEIGDAVARLKEVLEYNVVGGKYNRGITVLVVFRELVEPRKQDADSLQRALTVGWCIELLQAFFLVADDIPCIDSSLTRRGQTCWYRKPGIGLDAINDAFLLEACIYRLLKFYCREQPYYLNLIELFLQTSYNTEIGQTLDLIAGPQGNVDLSRFTEKRYKSIVKYKTAFYSFYLPVAAAMYMAGIDGEKEHANAKKILMEMGEFFQIQDDYLDLFGDPSVTGKIGTDIQDNKCSWLVVQCLQRASPEQRQILQENYGQKDAEKVARVKALYEEMNLQAVFLQYEEDSYSHLMGLIEQYAAPLPPAIFLELAHKIYKRRK

SEQ ID NO: 104 - protein, 355 aa, Acyrthosiphon pisum
MPVITGTAVSKDETRDFMAVFPDVVRDLTDTGRNLDVPDVTKWLAKLLQYNVPGGKKNRGLALVLSYKMLSSPADQTDENIRLSYILGWCVEILQAYQLVLDDIPCIDNAITRRGRPCWYRHNDIGLMAVNDGVLLEQSIYQLIKKYFKDKPYYTHILELFYDVTMKTSMGQCLDMLTANSFKSKKLEKYTMENYTAIVKYKTAYYSFFLPVCLAMRMTNINDPEIFRQAKTILLEMGHFFQVQDDFLDCYGDPDVMGKIGTDIEDGKCSWLAVVALQKVNSEQKKIMEDNYGIDNPANVAVIKDLYAQLKLPDTFHLYEEESYKLICTHIQQLSRGLSQDMFFKFLEKIYKRTL

SEQ ID NO: 105 - protein, 359 aa, Mycobacterium tuberculosis
MRGTDEKYGLPPQPDSDRMTRRTLPVLGLAHELITPTLRQMADRLDPHMRPVVSYHLGWSDERGRPVNNNCGKAIRPALVFVAAEAAGADPHSAIPGAVSVELVHNFFLVHDDLMDRDEHRRHRPTVWALWGDAMALLAGDAMLSLAHEVLLDCDSPHVGAALRAISEATRELIRGQAADTAFESRTDVALDECLKMAEGKTAALMAASAEVGALLAGAPRSVREALVAYGRHIGLAFQLVDDLLGIWGRPEITGKPVYSDLRSRKKTLPVTWTVAHGGLAGRRLAAWLVDETGSQTASDDELAAVAELIECGGGRRWASAEARRHVTQGIDMVARIGIPDRPAAELQDLAHYIVDRQA

SEQ ID NO: 106 - protein, 361 aa, Mycobacterium tuberculosis
MRGTDEKYGLPPQPDSDRMTRRTLPVLGLAHELITPTLRQMADRLDPHMRPVVSYHLGWSDERGRPVNNNCGKAIRPALVFVAAEAAGADPHSAIPGAVSVELVHNFFLVHDDLPCIDRDEHRRHRPTVWALWGDAMALLAGDAMLSLAHEVLLDCDSPHVGAALRAISEATRELIRGQAADTAFESRTDVALDECLKMAEGKTAALMAASAEVGALLAGAPRSVREALVAYGRHIGLAFQLVDDLLGIWGRPEITGKPVYSDLRSRKKTLPVTWTVAHGGLAGRRLAAWLVDETGSQTASDDELAAVAELIECGGGRRWASAEARRHVTQGIDMVARIGIPDRPAAELQDLAHYIVDRQA

SEQ ID NO: 107 - protein, 361 aa, Mycobacterium tuberculosis
MRGTDEKYGLPPQPDSDRMTRRTLPVLGLAHELITPTLRQMADRLDPHMRPVVSYHLGWSDERGRPVNNNCGKAIRPALVFVAAEAAGADPHSAIPGAVSVELVHNFSLVHDDLPCIDRDEHRRHRPTVWALWGDAMALLAGDAMLSLAHEVLLDCDSPHVGAALRAISEATRELIRGQAADTAFESRTDVALDECLKMAEGKTAALMAASAEVGALLAGAPRSVREALVAYGRHIGLAFQLVDDLLGIWGRPEITGKPVYSDLRSRKKTLPVTWTVAHGGLAGRRLAAWLVDETGSQTASDDELAAVAELIECGGGRRWASAEARRHVTQGIDMVARIGIPDRPAAELQDLAHYIVDRQA

SEQ ID NO: 108 - protein, 293 aa, Staphylococcus aureus
MTNLPMNKLIDEVNNELSVAINKSVMDTQLEESMLYSLNAGGKRIRPVLLLLTLDSLNTEYELGMKSAIALEMIHTYFLIHDDLPAMDNDDYRRGKLTNHKVYGEWTAILAGDALLTKAFELISSDDRLTDEVKIKVLQRLSIASGHVGMVGGQMLDMQSEGQPIDLETLEMIHKTKTGALLTFAVMSAADIANVDDTTKEHLESYSYHLGMMFQIKDDLLDCYGDEAKLGKKVGSDLENNKSTYVSLLGKDGAEDKLTYHRDAAVDELTQIDEQFNTKHLLEIVDLFYSRDH

SEQ ID NO: 109 - protein, 297 aa, Picea abies; identical to SEQ ID NO: 5

SEQ ID NO: 110 - protein, 296 aa, Abies grandis; identical to SEQ ID NO: 3

SEQ ID NO: 111 - protein, 360 aa, Catharanthus roseus; identical to SEQ ID NO: 4

SEQ ID NO: 112 - protein, 297 aa, Picea abies; identical to SEQ ID NO: 5

SEQ ID NO: 113 - protein, 296 aa, Abies grandis; identical to SEQ ID NO: 3

SEQ ID NO: 114 - protein, 360 aa, Catharanthus roseus; identical to SEQ ID NO: 4

SEQ ID NO: 115 - protein, 351 aa, Abies grandis
MQYKLALNGKTLKGETTTEAVDAATAEKVFKQYANDNGVDGEWTYDDATKTFTVTEFDFNKYMDSKAMTVNEALNKAIPLRYPQKIYESMRYSLLAGGKRVRPVLCIAACELVGGTEELAIPTACAIEMIHTMSLMHDDLPCIDNDDLRRGKPTNHKIFGEDTAVTAGNALHSYAFEHIAVSTSKTVGADRILRMVSELGRATGSEGVMGGQMVDIASEGDPSIDLQTLEWIHIHKTAMLLECSVVCGAIIGGASEIVIERARRYARCVGLLFQVVDDILDVTKSSDELGKTAGKDLISDKATYPKLMGLEKAKEFSDELLNRAKGELSCFDPVKAAPLLGLADYVAFRQN

SEQ ID NO: 116 - protein, 415 aa, Catharanthus roseus
MQYKLALNGKTLKGETTTEAVDAATAEKVFKQYANDNGVDGEWTYDDATKTFTVTEANVGQQVQRQSNSVAEEPLDPFSLVADELSILANRLRSMVVAEVPKLASAAEYFFKLGVEGKRFRPTVLLLMATAIDAPISRTPPDTSLDTLSTELRLRQQTIAEITKMIHVASLLHDDVLDDAETRRGIGSLNFVMGNKLAVLAGDFLLSRACVALASLKNTEVVSLLATVVEHLVTGETMQMTTTSDQRCSMEYYMQKTYYMTASLISNSCKAIALLAGQTSEVAMLAYEYGKNLGLAFQLIDDVLDFTGTSASLGKGSLSDIRHGIVTAPILFAIEEFPELRAVVDEGFENPYNVDLALHYLGKSRGIQRTRELAIKHANLASDAIDSLPVTDDEHVLRSRRALVELTQRVITRRK

SEQ ID NO: 117 - protein, 352 aa, Picea abies
MQYKLALNGKTLKGETTTEAVDAATAEKVFKQYANDNGVDGEWTYDDATKTFTVTEEFDFDKYMHSKAIAVNEALDKVIPPRYPQKIYESMRYSLLAGGKRVRPILCIAACELMGGTEELAMPTACAIEMIHTMSLIHDDLPYIDNDDLRRGKPTNHKVFGEDTAIIAGDALLSLAFEHVAVSTSRTLGTDIILRLLSEIGRATGSEGVMGGQVVDIESEGDPSIDLETLEWVHIHKTAVLLECSVVCGAIMGGASEDDIERARRYARCVGLLFQVVDDILDVSQSSEELGKTAGKDLISDKATYPKLMGLEKAKEFADELLNRGKQELSCFDPTKAAPLFALADYIASRQN

SEQ ID NO: 118 - protein, 297 aa, Humulus lupulus
MSTFNFKSYMVQKANSVNQALDAAVLLREPQMIHEAMRYSLLAGGKRVRPVLCLSACELVGGDESVAMPAACAVEMIHTMSLIHDDLPCMDNDDLRRGKPTNHKVFGEDVAVLAGDALLAYAFEHVAVSTVGVPAARIIRAIGELAKSIGSEGLVAGQVVDIDSEGLANVGLEQLEFIHLHKTAALLEASVVLGAILGGGTDEQVEELRSFARCIGLLFQAVDDILDVTKSSQELGKTAGKDLVADKATYPRLMGIEKSREFAEKLNREAQEHLGGFDPQKAAPLIALANYIAYRQN

SEQ ID NO: 119 - protein, 261 aa, Humulus lupulus
MASITADIEAHLKQSITLKPPLSVHEPMYNLVFSAPPNSAPSLCVAACELVGGHRSKAIAAASALRLLHAANFTHEHLPLTDSPSPSPVIHNSYDPSIQLLMPDAILPLGFELLAQSYNPAQNNSDRVLRVIVEFARAFGSKGILDGQYRQRVVSISNGDEVDNAERVDCSGREKEGKMHACAAACGAILGDANEEETEKLRTFGLYVGMIQGYSIKFMREREEEKEAERTIKELRNLALKELEHFHGRKLEPISSFIYCL

SEQ ID NO: 120 - protein, 297 aa, Mentha x piperita
MPAFDFDGYMLRKAKSVNKALEAAVQMKEPLKIHESMRYSLLAGGKRVRPMLCIAACELVGGDESTAMPAACAVEMIHTMSLMHDDLPCMDNDDLRRGKPTNHMAFGESVAVLAGDALLSFAFEHVAAATKGAPPERIVRVLGELAVSIGSEGLVAGQVVDVCSEGMAEVGLDHLEFIHHHKTAALLQGSVVLGAILGGGKEEEVAKLRKFANCIGLLFQVVDDILDVTKSSKELGKTAGKDLVADKTTYPKLIGVEKSKEFADRLNREAQEQLLHFHPHRAAPLIALANYIAYRDN

SEQ ID NO: 121 - protein, 267 aa, Mentha x piperita
MSQPYWAAIEADIERYLKKSITIRPPETVFGPMHHLTFAAPATAASTLCLAACELVGGDRSQAMAAAAAIHLVHAAAYVHEHLPLTDGSRPVSKPAIQHKYGPNVELLTGDGIVPFGFELLAGSVDPARTDDPDRILRVIIEISRAGGPEGMISGLHREEEIVDGNTSLDFIEYVCKKKYGEMHACGAACGAILGGAAEEEIQKLRNFGLYQGTLRGMMEMKNSHQLIDENIIGKLKELALEELGGFHGKNAELMSSLVAEPSLYAA

SEQ ID NO: 122 - protein, 297 aa, Catharanthus roseus
MSSFDFKAYMIGKANSVNKALEDAVLVREPLKIHESMRYSLLAGGKRVRPMLCIAACELFGGTESVAMPSACAVEMIHTMSLMHDDLPCMDNDDLRRGKPTNHKVFGEDVAVLAGDALLAFAFEHIATATKGVSSERIVRVVGELAKCIGSEGLVAGQVVDVCSEGIADVGLEHLEFIHIHKTAALLEGSVVLGAIVGGANDEQISKLRKFARCIGLLFQVVDDILDVTKSSQELGKTAGKDLVADKVTYPKLLGIDKSREFAEKLNREAQEQLAEFDPEKAAPLIALANYIAYRDN

SEQ ID NO: 123 - protein, 261 aa, Catharanthus roseus
MKSNSWANIESDIQTHLKKSIPIRAPEDVFEPMHYLTFAAPRTTAPALCIAACEVVGGDGDQAMAAAAAIHLVHAAAYAHENLPLTDRRRPKPPIQHKFNSNIELLTGDGIVPYGFELLAKSMDSNNSDRILRVIIEITQAAGSKGIIDGQFRELDVIDSEINMGLIEYVCKKKEGELNACGAACGAILGGGSEEEIGKLRKFGLYAGMIQGLVHGVGKNREEIQELVRKLRYLAMEELKSLKNRKIDTISSLLETDLCSV

SEQ ID NO: 124 - protein, 297 aa, Nepeta cataria
MAPFNFNAYVVEKANRVNKALDDAVEVKNPPMIHEAMRYSLLAGGKRVRPMLCIAACEIVGGHQSAAIPAACAVEMIHTMSLIHDDLPCMDNDDLRRGKPTNHKVFGEEVAVLAGDALLAFAFEFIATATVGVAAERILAAVGELAKAIGTEGLVAGQVVDLNCTGNANVGLETLEFIHIHKTAALLEASVVLGAILGGGSDSEVEKLRTFARKIGLLFQVVDDILDVTKSSEELGKTAGKDLTVDKTTYPKLLGLEKAVEFAEKLNEEAKAQLAEFEPCKAAPLAALADYIAHRQN

SEQ ID NO: 125 - protein, 273 aa, Nepeta cataria
MNQSYWAAIEADIGTYLKKSIPIRPPETVFEPMHHLTFAAPTTAASALCVAACELTGGDRSQALVAASAIHLVHAAAYAHEHLPLTDRPRPESKPEIHHKYSPNIELLTPDGMVPFGFELLARSMDPARDGDPDRILRVIIEISRAGGSEGMIDGLYREEEIADLNYPRPDFIEYVCKKKYGELHACGAACGAILAGAAEEEVEKLRNFGRYAGTLIGIMGNKYNVPEIGNIISKLREFAMEELEKGFHGKNIELISSLVAEPSQVAESLSAA

SEQ ID NO: 126 - protein, 357 aa, Streptomyces aculeolatus
MTTEVTSFTGAGPHPAASVRRITDDLLQRVEDKLASFLTAERDRYAAMDERALAAVDALTDLVTSGGKRVRPTFCITGYLAAGGDAGDPGIVAAAAGLEMLHVSALIHDDILDNSAQRRGKPTIHTLYGDLHDSHGWRGESRRFGEGIGILIGNLALVYSQELVCQAPPAVLAEWHRLCSEVNIGQCLDVCAAAEFSADPELSRLVALIKSGRYTIHRPLVMGANAASRPDLAAAYVEYGEAVGEAFQLRDDLLDAFGDSTETGKPTGLDFTQHKMTLLLGWAMQRDTHIRTLMTEPGHTPEEVRRRLEDTEVPKDVERHIADLVEQGRAAIADAPIDPQWRQELADMAVRAAYRTN

SEQ ID NO: 127 - protein, 352 aa, Streptomyces sp. KO-3988
MTTDTGQDAVGLARRTGADLLHRVEDRLRSLLAVERDAWAAVHEQAVVPVDALSELIASGGKRIRPAFCITGYLAAGGDPAEPGIVAAGAALEMLHLSALVHDDVLDDSSSRRGVPTVHTQAMALHESSGWQGEPRRYGEGVAILVGDLALVYSEELMAEAPRRVLPEWNKLRSEVMIGQYMDVHAAAEFSVDPRSSRLIARIKSGRYTIHRPLVVGAKRGRGRGDLAPALEEYGEAVGEAFQLRDDLLDASATPAETGKPTGLDFTQHKMTLLLGWAMQRDEHIHTLVTEPGHTPDEVRRRLLDTGVPADVERHIAGLVERGCKAIADAPVDQVWRGELAAMAGRVAYRTA

SEQ ID NO: 128 - protein, 352 aa, Streptomyces cinnamonensis
MACIGTDQELTALARRTREELLEQMEDRLRAFLRAEHELWAEVNERAVGAVAALTDLVAAGGKRIRPAFCIAGYLAAGGDPDDTAVVAAAAALEMLHASALIHDDVIDASSHRRGRPTVHARHSALHDRNAWQGESRRYGEGVAILVGDLALVYSEQLMAAAPPAVLPVWGTLRSELMIGQYMDMTAAAEFLVDPRLSRWIALAKSGHYTIHRPLVVGASAAGRADLAPAFAKYGEAVGEAFQLRDDLLDAFGDFAHTGKPAGLDFSQHKMTLLLSWAMQRDARIHSLITEPGHTPDEVRRRLVDTGVPDDVEKHIAGLVEQGCEAIADVPIDPVWRTELTTMATQAAYRTT

SEQ ID NO: 129 - protein, 351 aa, Streptomyces longwoodensis
MTRRAATDQATSARRTVEDLLQRVQHRLTSFLAAERAHYAEVHEHAVVAIDALADLAAAGGKLLRPAFCLTGYLAAGGDPAEPGIVDAAAALELLHISALVHDDVLDDSRTRRGKPAVHVLHTTLHRTRGWQGESRRFGEGVALLVGDLALVYSDELMAGAPRGAFAEWHRLRSEVMIGQYMDVAAAAEFSVDPDLSRLIALIKSGRYTIHRPLVLGASAAGRTDLAGALAHYGEAVGEAFQLRDDLLDAFGDAARTGKTAGLDFSQHKMTLLLGWAMQRDSRIHDLITEPGHTPDEIRARLLDTGVPADVEQHIAHLVDQGCAALADAPLEPQWRAQLTDMALRVAYRDK

SEQ ID NO: 130 - protein, 352 aa, Streptomyces sp. GKU 895
MPQNVRGEESAAAARRTVEELLQRVQDRLSGFLAAERARYAEVDERAVVAIDALSDLVEAGGKLVRPAFCLAGYLAAGGDPEAPGIIDAAAALEMLHISALVHDDVLDDSRTRRGKPAVHVLHSSLHRSRGWQGEARRFGEGVALLVGDLALVYSDELMSHAPATAGPEWHRLRSEVMIGQYMDVAAAAEFSVDPALSRLIALIKSGRYTIHRPLVVGASAAGRADLAPALAEYGEAVGEAFQLRDDLLDAFGDAAQTGKTAGLDFSQHKMTLLLGWAMQRDAHIHGLITEPGHTPDEVRARLLDTGVPEEVERHIAALVDQGCAAIADAPVGPQWRSELTNMALRVAYRNK

SEQ ID NO: 131 - protein, 357 aa, Streptomyces sp. NRRL S-37
MPVTSDATRDTGQEAVSHARRITTDLLRRVEDRLSSLLAAEREVWAEVHEGAVVPVDALAELMASGGKRIRPAFCVTGYLAAGGDPDAPGIVAAGAALEMLHISALVHDDVLDDSSRRRGLPTVHTKHAALHDSRGWQGESRRYGEGVAVLVGDLALVYSDALMTEAPRQVLPEWNRLRSEVMIGQYLDVHAAAEFSASPRSARLIARIKSGRYTIHRPLVVGAKAAGRDELAPVFEEYGEAVGEAFQLRDDLLDAFGDSTDTGKPTGLDFTQHKMTLLLGWAMQRDERVHGLITEPGHTPGEVRRRLVDTGVPADVERHIAGLVERGCKAIADAPIDQVWRGELADMARRAAYRSA

SEQ ID NO: 132 - protein, 412 aa, Streptomyces aculeolatus
MQYKLALNGKTLKGETTTEAVDAATAEKVFKQYANDNGVDGEWTYDDATKTFTVTETTEVTSFTGAGPHPAASVRRITDDLLQRVEDKLASFLTAERDRYAAMDERALAAVDALTDLVTSGGKRVRPTFCITGYLAAGGDAGDPGIVAAAAGLEMLHVSALIHDDILDNSAQRRGKPTIHTLYGDLHDSHGWRGESRRFGEGIGILIGNLALVYSQELVCQAPPAVLAEWHRLCSEVNIGQCLDVCAAAEFSADPELSRLVALIKSGRYTIHRPLVMGANAASRPDLAAAYVEYGEAVGEAFQLRDDLLDAFGDSTETGKPTGLDFTQHKMTLLLGWAMQRDTHIRTLMTEPGHTPEEVRRRLEDTEVPKDVERHIADLVEQGRAAIADAPIDPQWRQELADMAVRAAYRTN

SEQ ID NO: 133 - protein, 407 aa, Streptomyces sp. KO-3988
MQYKLALNGKTLKGETTTEAVDAATAEKVFKQYANDNGVDGEWTYDDATKTFTVTETTDTGQDAVGLARRTGADLLHRVEDRLRSLLAVERDAWAAVHEQAVVPVDALSELIASGGKRIRPAFCITGYLAAGGDPAEPGIVAAGAALEMLHLSALVHDDVLDDSSSRRGVPTVHTQAMALHESSGWQGEPRRYGEGVAILVGDLALVYSEELMAEAPRRVLPEWNKLRSEVMIGQYMDVHAAAEFSVDPRSSRLIARIKSGRYTIHRPLVVGAKRGRGRGDLAPALEEYGEAVGEAFQLRDDLLDASATPAETGKPTGLDFTQHKMTLLLGWAMQRDEHIHTLVTEPGHTPDEVRRRLLDTGVPADVERHIAGLVERGCKAIADAPVDQVWRGELAAMAGRVAYRTA

SEQ ID NO: 134 - protein, 407 aa, Streptomyces cinnamonensis
MQYKLALNGKTLKGETTTEAVDAATAEKVFKQYANDNGVDGEWTYDDATKTFTVTEACIGTDQELTALARRTREELLEQMEDRLRAFLRAEHELWAEVNERAVGAVAALTDLVAAGGKRIRPAFCIAGYLAAGGDPDDTAVVAAAAALEMLHASALIHDDVIDASSHRRGRPTVHARHSALHDRNAWQGESRRYGEGVAILVGDLALVYSEQLMAAAPPAVLPVWGTLRSELMIGQYMDMTAAAEFLVDPRLSRWIALAKSGHYTIHRPLVVGASAAGRADLAPAFAKYGEAVGEAFQLRDDLLDAFGDFAHTGKPAGLDFSQHKMTLLLSWAMQRDARIHSLITEPGHTPDEVRRRLVDTGVPDDVEKHIAGLVEQGCEAIADVPIDPVWRTELTTMATQAAYRTT

SEQ ID NO: 135 - protein, 406 aa, Streptomyces longwoodensis
MQYKLALNGKTLKGETTTEAVDAATAEKVFKQYANDNGVDGEWTYDDATKTFTVTETRRAATDQATSARRTVEDLLQRVQHRLTSFLAAERAHYAEVHEHAVVAIDALADLAAAGGKLLRPAFCLTGYLAAGGDPAEPGIVDAAAALELLHISALVHDDVLDDSRTRRGKPAVHVLHTTLHRTRGWQGESRRFGEGVALLVGDLALVYSDELMAGAPRGAFAEWHRLRSEVMIGQYMDVAAAAEFSVDPDLSRLIALIKSGRYTIHRPLVLGASAAGRTDLAGALAHYGEAVGEAFQLRDDLLDAFGDAARTGKTAGLDFSQHKMTLLLGWAMQRDSRIHDLITEPGHTPDEIRARLLDTGVPADVEQHIAHLVDQGCAALADAPLEPQWRAQLTDMALRVAYRDK

SEQ ID NO: 136 - protein, 407 aa, Streptomyces sp. GKU 895
MQYKLALNGKTLKGETTTEAVDAATAEKVFKQYANDNGVDGEWTYDDATKTFTVTEPQNVRGEESAAAARRTVEELLQRVQDRLSGFLAAERARYAEVDERAVVAIDALSDLVEAGGKLVRPAFCLAGYLAAGGDPEAPGIIDAAAALEMLHISALVHDDVLDDSRTRRGKPAVHVLHSSLHRSRGWQGEARRFGEGVALLVGDLALVYSDELMSHAPATAGPEWHRLRSEVMIGQYMDVAAAAEFSVDPALSRLIALIKSGRYTIHRPLVVGASAAGRADLAPALAEYGEAVGEAFQLRDDLLDAFGDAAQTGKTAGLDFSQHKMTLLLGWAMQRDAHIHGLITEPGHTPDEVRARLLDTGVPEEVERHIAALVDQGCAAIADAPVGPQWRSELTNMALRVAYRNK

SEQ ID NO: 137 - protein, 412 aa, Streptomyces sp. NRRL S-37
MQYKLALNGKTLKGETTTEAVDAATAEKVFKQYANDNGVDGEWTYDDATKTFTVTEPVTSDATRDTGQEAVSHARRITTDLLRRVEDRLSSLLAAEREVWAEVHEGAVVPVDALAELMASGGKRIRPAFCVTGYLAAGGDPDAPGIVAAGAALEMLHISALVHDDVLDDSSRRRGLPTVHTKHAALHDSRGWQGESRRYGEGVAVLVGDLALVYSDALMTEAPRQVLPEWNRLRSEVMIGQYLDVHAAAEFSASPRSARLIARIKSGRYTIHRPLVVGAKAAGRDELAPVFEEYGEAVGEAFQLRDDLLDAFGDSTDTGKPTGLDFTQHKMTLLLGWAMQRDERVHGLITEPGHTPGEVRRRLVDTGVPADVERHIAGLVERGCKAIADAPIDQVWRGELADMARRAAYRSA

SEQ ID NO: 138 - protein, 349 aa, Penicillium aethiopicum
MATSTTTSLKEFLSVFPQLVADLRALCLEEYQLPACVWDRFESTLNHNTLGGKCNRGLSVIDSVRLLRDGLELSPAEYFDAAVLGWLVELLQATMLVLDDIMDGSPTRRGKPSWYRVPGVGMAAVNDATMLESAIYMLLKKYFAGRAIYLPVVDLFHETALQIELGQAFDMLIANEGTPDLTTFVPATYSQIVTYKTAFYSFYLPVALALHAVDAATPTNLAAARAILVPMGEYFQVQDDYLDCFADPTVLGKVGTDIIEGKCSWLVVQALQRASTDQAQLLAENYGSASGESSVKALYSELDLESVYRTFEEQRVAELRTLITGLDESQGLRKSVFEELLGKIYQRRK

SEQ ID NO: 139 - protein, 404 aa, Penicillium aethiopicum
MQYKLALNGKTLKGETTTEAVDAATAEKVFKQYANDNGVDGEWTYDDATKTFTVTEATSTTTSLKEFLSVFPQLVADLRALCLEEYQLPACVWDRFESTLNHNTLGGKCNRGLSVIDSVRLLRDGLELSPAEYFDAAVLGWLVELLQATMLVLDDIMDGSPTRRGKPSWYRVPGVGMAAVNDATMLESAIYMLLKKYFAGRAIYLPVVDLFHETALQIELGQAFDMLIANEGTPDLTTFVPATYSQIVTYKTAFYSFYLPVALALHAVDAATPTNLAAARAILVPMGEYFQVQDDYLDCFADPTVLGKVGTDIIEGKCSWLVVQALQRASTDQAQLLAENYGSASGESSVKALYSELDLESVYRTFEEQRVAELRTLITGLDESQGLRKSVFEELLGKIYQRRK

SEQ ID NO: 140 - protein, 360 aa, Ocimum basilicum
MAKSPETEHPVKALGWAATDNSGTFSPFNFSRRATGERDVQFRVLYCGVCHSDLHMVKNEWGVTHYPIVPGHEIVGIVTEVGSKVEKVKIGDKVGVGVLVGSCRQCDQCSNDLENYCYKQILTYGAPYLDGTIARGGYSDIMVADEHFIIRWPENFPLDAGAPLLCAGITTYSPLKYFGLDKPGLRVGVNGLGGLGHVAVKFAKAFGTKVTVISTSLSKKEEAMQHLGVDEFVVSTDPQQMQAAVGTLDGIIDTVSAPHPIVPLLSLLKPHGKLIVVGLPDKPLQLPVFPLIQGRRTIAGSGIGGLKETQEMIDFAAKNNIVADVEVIPIDYINTAMDRLLKSDVKYRFVIDVEKSLKPQ

SEQ ID NO: 141 - protein, 547 aa, Catharanthus roseus
MSSSSSSSSSMSLPLATPLIKDNESLIKFLRQPLVLPHEVDDSTKRRELLERTRKELELNAEKPLEALKMIDIIQRLGLSYHFEDDINSILTGFSNISSQTHEDLLTASLCFRLLRHNGHKINPDIFQKFMDNNGKFKDSLKDDTLGMLSLYEASYLGANGEEILMEAQEFTKTHLKNSLPAMAPSLSKKVSQALEQPRHRRMLRLEARRFIEEYGAENDHNPDLLELAKLDYNKVQSLHQMELSEITRWWKQLGLVDKLTFARDRPLECFLWTVGLLPEPKYSGCRIELAKTIAILLVIDDIFDTHGTLDELLLFTNAIKRWDLEAMEDLPEYMRICYMALYNTTNEICYKVLKENGWSVLPYLKATWIDMIEGFMVEAEWFNSDYVPNMEEYVENGVRTAGSYMALVHLFFLIGQGVTEDNVKLLIKPYPKLFSSSGRILRLWDDLGTAKEEQERGDLASSIQLFMREKEIKSEEEGRKGILEIIENLWKELNGELVYREEMPLAIIKTAFNMARASQVVYQHEEDTYFSSVDNYVKALFFTPCF

SEQ ID NO: 142 - protein, 505 aa, Ocimum basilicum
MQHMEESSSKRREYLLEETTRKLQRNDTESVEKLKLIDNIQQLGIGYYFEDAINAVLRSPFSTGEEDLFTAALRFRLLRHNGIEISPEIFLKFKDERGKFDESDTLGLLSLYEASNLGVAGEEILEEAMEFAEARLRRSLSEPAAPLHGEVAQALDVPRHLRMARLEARRFIEQYGKQSDHDGDLLELAILDYNQVQAQHQSELTEIIRWWKELGLVDKLSFGRDRPLECFLWTVGLLPEPKYSSVRIELAKAISILLVIDDIFDTYGEMDDLILFTDAIRRWDLEAMEGLPEYMKICYMALYNTTNEVCYKVLRDTGRIVLLNLKSTWIDMIEGFMEEAKWFNGGSAPKLEEYIENGVSTAGAYMAFAHIFFLIGEGVTHQNSQLFTQKPYPKVFSAAGRILRLWDDLGTAKEEQERGDLASCVQLFMKEKSLTEEEARSRILEEIKGLWRDLNGELVYNKNLPLSIIKVALNMARASQVVYKHDQDTYFSSVDNYVDALFFTQ

SEQ ID NO: 143 - protein, 507 aa, Valeriana officinalis
MIMELVEATRRTLRNESSDSTEKMRLIDSLQRLGLNHHFEQDIKEMLQDFANEHKNTNQDLFTTSLRFRLLRHNGFNVTPDVFNKFTEENGKFKESLGEDTIGILSLYEASYLGGKGEEILSEAMKFSESKLRESSGHVAPHIRRQIFQSLELPRHLRMARLESRRYIEEDYSNEIGADSSLLELAKLDFNSVQALHQMELTEISRWWKQLGLSDKLPFARDRPLECFLWTVGLLPEPKYSGCRIELAKTIAVLLVIDDIFDTYGSYDQLILFTNAIRRWDLDAMDELPEYMKICYMALYNTTNEICYKVLKENGWSVLPYLERTWIDMVEGFMLEAKWLNSGEQPNLEAYIENGVTTAGSYMALVHLFFLIGDGVNDENVKLLLDPYPKLFSSAGRILRLWDDLGTAKEEQERGDVSSSIQLYMKEKNVRSESEGREGIVEIIYNLWKDMNGELIGSNALPQAIIETSFNMARTSQVVYQHEDDTYFSSVDNYVQSLFFTPVSVSV

SEQ ID NO: 144 - protein, 547 aa, Catharanthus roseus; identical to SEQ ID NO: 141

SEQ ID NO: 145 - protein, 505 aa, Ocimum basilicum; identical to SEQ ID NO: 142

SEQ ID NO: 146 - protein, 507 aa, Valeriana officinalis; identical to SEQ ID NO: 143

SEQ ID NO: 147 - protein, 547 aa, Catharanthus roseus; identical to SEQ ID NO: 141

SEQ ID NO: 148 - protein, 505 aa, Ocimum basilicum; identical to SEQ ID NO: 142

SEQ ID NO: 149 - protein, 569 aa, Perilla citriodora
MSSKAASCLRASCSLQLDVKPVQEGRRSGNYQPSIWDFNYVQSLNTPYKEERYLTRHAELIVQVKPLLEKKMEPAQQLELIDDLNNLGLSYFFQDRIKQILSFIYDENQCFHSNINDQAEKRDLYFTALGFRLLRQHGFDVSQEVFDCFKNDNGSDFKASLSDNTKGLLQLYEASFLVREGEDTLEQARQFATKFLRRKLDEIDDNHLLSCIHHSLEIPLHWRIQRLEARWFLDAYATRHDMNPVILELAKLDFNIIQATHQEELKDVSRWWQNTRLAEKLPFVRDRLVESYFWAIALFEPHQYGYQRRVAAKIITLATSIDDVYDIYGTLDELQLFTDNFRRWDTESLGRLPYSMQLFYMVIHNFVSELAYEILKEKGFIVIPYLQRSWVDLAESFLKEANWYYSGYTPSLEEYIDNGSISIGAVAVLSQVYFTLANSIEKPKIESMYKYHHILRLSGLLVRLHDDLGTSLFEKKRGDVPKAVEICMKERNVTEEEAEEHVKYLIREAWKEMNTATTAAGCPFMDELNVAAANLGRAAQFVYLDGDGHGVQHSKIHQQMGGLMFEPYV

SEQ ID NO: 150 - protein, 507 aa, Valeriana officinalis; identical to SEQ ID NO: 143

SEQ ID NO: 151 - protein, 150 aa, Rosa hybrid cultivar
MGNETVVVAETAGSIKVAVVVCLLRGQNVLLGRRRSSLGDSTFSLPSGHLEFGESFEECAARELKEETDLDIGKIELLTVTNNLFLDEAKPSQYVAVFMRAVLADPRQEPQNIEPEFCDGWGWYEWDNLPKPLFWPLDNVVQDGFNPFPT

SEQ ID NO: 152 - protein, 147 aa, Arabidopsis thaliana
MSTGEAIPRVAVVVFILNGNSILLGRRRSSIGNSTFALPGGHLEFGESFEECAAREVMEETGLKIEKMKLLTVTNNVFKEAPTPSHYVSVSIRAVLVDPSQEPKNMEPEKCEGWDWYDWENLPKPLFWPLEKLFGSGFNPFTHGGGD

SEQ ID NO: 153 - protein, 602 aa, Catharanthus roseus
MQYKLALNGKTLKGETTTEAVDAATAEKVFKQYANDNGVDGEWTYDDATKTFTVTESSSSSSSSSMSLPLATPLIKDNESLIKFLRQPLVLPHEVDDSTKRRELLERTRKELELNAEKPLEALKMIDIIQRLGLSYHFEDDINSILTGFSNISSQTHEDLLTASLCFRLLRHNGHKINPDIFQKFMDNNGKFKDSLKDDTLGMLSLYEASYLGANGEEILMEAQEFTKTHLKNSLPAMAPSLSKKVSQALEQPRHRRMLRLEARRFIEEYGAENDHNPDLLELAKLDYNKVQSLHQMELSEITRWWKQLGLVDKLTFARDRPLECFLWTVGLLPEPKYSGCRIELAKTIAILLVIDDIFDTHGTLDELLLFTNAIKRWDLEAMEDLPEYMRICYMALYNTTNEICYKVLKENGWSVLPYLKATWIDMIEGFMVEAEWFNSDYVPNMEEYVENGVRTAGSYMALVHLFFLIGQGVTEDNVKLLIKPYPKLFSSSGRILRLWDDLGTAKEEQERGDLASSIQLFMREKEIKSEEEGRKGILEIIENLWKELNGELVYREEMPLAIIKTAFNMARASQVVYQHEEDTYFSSVDNYVKALFFTPCF

SEQ ID NO: 154 - protein, 560 aa, Ocimum basilicum
MQYKLALNGKTLKGETTTEAVDAATAEKVFKQYANDNGVDGEWTYDDATKTFTVTEQHMEESSSKRREYLLEETTRKLQRNDTESVEKLKLIDNIQQLGIGYYFEDAINAVLRSPFSTGEEDLFTAALRFRLLRHNGIEISPEIFLKFKDERGKFDESDTLGLLSLYEASNLGVAGEEILEEAMEFAEARLRRSLSEPAAPLHGEVAQALDVPRHLRMARLEARRFIEQYGKQSDHDGDLLELAILDYNQVQAQHQSELTEIIRWWKELGLVDKLSFGRDRPLECFLWTVGLLPEPKYSSVRIELAKAISILLVIDDIFDTYGEMDDLILFTDAIRRWDLEAMEGLPEYMKICYMALYNTTNEVCYKVLRDTGRIVLLNLKSTWIDMIEGFMEEAKWFNGGSAPKLEEYIENGVSTAGAYMAFAHIFFLIGEGVTHQNSQLFTQKPYPKVFSAAGRILRLWDDLGTAKEEQERGDLASCVQLFMKEKSLTEEEARSRILEEIKGLWRDLNGELVYNKNLPLSIIKVALNMARASQVVYKHDQDTYFSSVDNYVDALFFTQ

SEQ ID NO: 155 - protein, 624 aa, Perilla citriodora
MQYKLALNGKTLKGETTTEAVDAATAEKVFKQYANDNGVDGEWTYDDATKTFTVTESSKAASCLRASCSLQLDVKPVQEGRRSGNYQPSIWDFNYVQSLNTPYKEERYLTRHAELIVQVKPLLEKKMEPAQQLELIDDLNNLGLSYFFQDRIKQILSFIYDENQCFHSNINDQAEKRDLYFTALGFRLLRQHGFDVSQEVFDCFKNDNGSDFKASLSDNTKGLLQLYEASFLVREGEDTLEQARQFATKFLRRKLDEIDDNHLLSCIHHSLEIPLHWRIQRLEARWFLDAYATRHDMNPVILELAKLDFNIIQATHQEELKDVSRWWQNTRLAEKLPFVRDRLVESYFWAIALFEPHQYGYQRRVAAKIITLATSIDDVYDIYGTLDELQLFTDNFRRWDTESLGRLPYSMQLFYMVIHNFVSELAYEILKEKGFIVIPYLQRSWVDLAESFLKEANWYYSGYTPSLEEYIDNGSISIGAVAVLSQVYFTLANSIEKPKIESMYKYHHILRLSGLLVRLHDDLGTSLFEKKRGDVPKAVEICMKERNVTEEEAEEHVKYLIREAWKEMNTATTAAGCPFMDELNVAAANLGRAAQFVYLDGDGHGVQHSKIHQQMGGLMFEPYV

SEQ ID NO: 156 - protein, 562 aa, Valeriana officinalis
MQYKLALNGKTLKGETTTEAVDAATAEKVFKQYANDNGVDGEWTYDDATKTFTVTEIMELVEATRRTLRNESSDSTEKMRLIDSLQRLGLNHHFEQDIKEMLQDFANEHKNTNQDLFTTSLRFRLLRHNGFNVTPDVFNKFTEENGKFKESLGEDTIGILSLYEASYLGGKGEEILSEAMKFSESKLRESSGHVAPHIRRQIFQSLELPRHLRMARLESRRYIEEDYSNEIGADSSLLELAKLDFNSVQALHQMELTEISRWWKQLGLSDKLPFARDRPLECFLWTVGLLPEPKYSGCRIELAKTIAVLLVIDDIFDTYGSYDQLILFTNAIRRWDLDAMDELPEYMKICYMALYNTTNEICYKVLKENGWSVLPYLERTWIDMVEGFMLEAKWLNSGEQPNLEAYIENGVTTAGSYMALVHLFFLIGDGVNDENVKLLLDPYPKLFSSAGRILRLWDDLGTAKEEQERGDVSSSIQLYMKEKNVRSESEGREGIVEIIYNLWKDMNGELIGSNALPQAIIETSFNMARTSQVVYQHEDDTYFSSVDNYVQSLFFTPVSVSV

SEQ ID NO: 157 - protein, 542 aa, Vinca minor
MSMPLSMSQPIATPFITDNESLLKFLRQPLVLPHEVDDSTKRRELLERTRKELQISEDQPLEALKMIDTIERLGLAYHFEEDINSLLTGFSNAQSDEDLLTASLRFRLLRHNGHKINPDIFLKFMDKNGKFKESLKEETLGMLSLYEASYLGANGEDILEQALEFTQAHLKKSISGVAPPLSKKISQALELPRHRRMARLEARRFIDEYGGESDHNPDLLELAKLDYNKVQSLHQMELSEISRWWKQLGLVDKLTFARDRPLECFLWTVGLLPEPKYSACRIELAKTIAILLVIDDIFDTHGTLDELLLFTNAIRRWDLEAIEDLPEYMRICYMALYNTTNEICYKVLKENGWSVLPYLKATWIDMIEGFMVEAEWFNSDYVPNMEEYVENGVTTAGSYMALVHLFFLMGQGVTEDNVKLLLKPYPKLFSSSGRILRLWDDLGTAKEEQERGDLASSIQLFMREKNIKSDEEGRKCILEIIDKLWKEMNGEVVSRNNSLPLPIIKVAFNMARASQVVYQHEEDSYFSSVDNYVQSLFFTPFN

SEQ ID NO: 158 - protein, 541 aa, Cinchona pubescens
MCLPSQTLTQPIATPLITDNDSLLKYLRQPLMLPHEVDDSTKRKELLERTRRELRSTTEPLEAMKLIDTLQRLGIAYHFEDDMNVILSSFSSDGQSDEDLFTAALRFRLLRHNGHKISPDIFQRFKDHKGKFKDSLKEDTLGMLSLYEASHLGANGEDILSEAMEFSEAHLKKSLPKLEPLPAKHVSKALELPRHRRMARLEARRYIEEYGKESGHNPDLLELAKLDYNKVQSLHQMELSEITRWWKQLGLVDKLTFARDRPLECFLWTVGILPEPKYSSCRIELAKTIAILLVIDDIFDTHGTVDELVLFTNAIRRWDLEAMEELPEYMKICYMALYNTTNEICYKILKEKGWSVLPYLKSTWIDMIEGFMMEASWYSNAQIPNMEEYVENGVTTAGAYMALVHLFFLIGQGVTQDNVKLLMKPYPKLFSSSGRILRLWDDLGTAKEEQERGDLASSIQLFMRENNITCDEEGRKRILLLIDNLWKDLNWELVSRNELPLSIIKAAFNMARASQVVYQHEEDSYFSSVDNYVQALFFTPI

SEQ ID NO: 159 - protein, 523 aa, Rauvolfia serpentina
MNLSLSFCANLWCFLMRLMRTTRGGNCWKEQEKNLLTSADQPLEALKMIDTLQRLGLAYHFEDDINSILTGFSSSQSDEDLLTAALRFRLLRHNGHKISSDVFQKFMDNKGKFKESLKEDTLGLLSLYEASYLGANGEDILMQALEFTQAHLKKSLSGLAPPLAKKISQGLELPRHRRMARLEARRFIEEYGGESDHKPDLLELAKLDYNKVQSLHQMELSEITRWWKQLGLVDKLTFARDRPLECFLWTVGILPEPKFSACRIELAKTIAILLVIDDIFDTHGTIDELVLFTNAIRRWDLEAMENLPEYMRICYMALYNTTNEICYKVLKENGWSVLPYLKATWIDMIEGFMLEAQWFNSGYVPNMEEYVENGVTTAGAYMALVHLFFLIGQGVTQENVKLLVRPYPKLFSSSGRILRLWDDLGTAKEEQERGDLASSIQLFMRENSITSDEEGRKRILQIIDNLWKELNGELMSRNALPLEIVKAAFNMARASQVVYQHEEDSYFSSVDNYVQALFFTPFN

SEQ ID NO: 160 - protein, 586 aa, Swertia japonica
MVITRNFASFSEVCISSGTLFSYLRRQYNQYPIAKTSHICMCMPLSTSTMSSQPIATPLIKDNESLLRYLRQPMVLPHELDDDTKRRELVERTRRELQSMSKPLEAMKMIDTLDRLGIAYHFEDDINAILTTFSKNAQPNEDLLTTSLRFRLLRHNGFKISPEIFEKFLDQNGKFEESLTKDIPGLISLYEASYMGAGGEEILLQALEFSEGHLKSSKNNLTPQLSRQVSQALELPRHRRMARLEARRYIEEYSKENQYNNPDLLELAKLDYNKVQALHQMELTEITRWWKQLGLVDKLPFARDRPLECFLWTVGLMPEPKYSGCRIELAKTIAILLVIDDIFDTHGTIDELVLFTNAIRRWDLKAMEELPEYMRICYMALYNTTNEISYKILKENGWSVLPYLKAVWIDVVDGFMMEASWFSNGQVPKVEEYLENGVTTAGSYMALVHVFFLIGKGVTEESVQLLMNPYPKLFSNSGSILRLWDDLGTAKEEQERGDVASIIILFMKEKNITSDEEARECILQLIHNIWKELNGELVSRNGLPLEIKKVALNMARASQVVYQHEEDTYFSNVDNYVMALFFTPFN

SEQ ID NO: 161 - protein, 480 aa, Coffea canephora
MNLIDTLQRLGLAYHFEDDMNAILSQLSSSGQSDGDLLTTALRFRLLRHNGHKISSDIFQKFMDKNGKFKDSLKEDTMGLLSLYEASHLAANGEDILLEAMELTEAHLKQSLPSLPTQLARKVSSALELPRHRRMARLEARRYIQEYSEEIGHDPNLLELAKLDYNKVQSLHQMELTDISRWWKQLGLVDKLTFARDRPLECFLWTVGILPEPKYSNCRIELAKTIAILLVIDDIFDTHGTIDELVLFTNAIRRWDLEAMEGLPEYMRICYMALYNTTNEICYKILKENGWSVLPYLKATWIDMIEGFMLEASWYSNGQEPNMEEYVANGVTTAGTYMAMVHLFFLIGQGVTEENVKLLMKPYPKLFSCSGRILRLWDDLGTAKEEQERGDLASSIQLFMRENNITCDEEGRKRILQLIDNLWKDLNWGLVSRNAMPLAIIKAAFNMARSSQVVYQHEEESYFSSVDNYVESLFFTPIIN

SEQ ID NO: 162 - protein, 609 aa, Citrus unshiu
MREKMISCEEEARKHIRQLIRSLWVELNGMLVAPAALPASIVNASLNLARTAQVVYQHGDDSTVTSVNGHIERLLNGGNCWSIKEDEKFMEFVDDSLLQFCKRKMLKYQLVWLVNGLGLAIEKMMVRWLTGECSLLEDLFCFDCWDLKHFCVSRAVKLKLDMLGCKMEATPFLETSGGSGYTRLDKINVGKAVEYILSCRNLDGGFWWGVSCRANYASYLATQDEDILFQAMEFTKTELTQSVSLMDSQSSRHVVQALALPRHLRMSRSEAGNYINEYSQSWNHDQTLLQLAKSDFNMVQSLHQRELAEIKRWWKQLGLVDKLGFGRDRPLECFLWTVGIFPEPYYSNCRIELAKTIALLLVIDDIFDTYGSLSDLVLFTEAIQRWDLGAMEHIPEYMKICYMALYNTTNEISYRILKDHGWNVVPQLKRTWIDIFKAQLSEAKWFSEGYVPTQEQYLRNGVTTGGTYMALVHAFCLMGQDVTKETLAMMEPYPNLFSCSGKILRLWDDLGAAREEQERGDVASSIECYMREKTISCEEEARKHIRQLIRSLWVELNGMLVAPAALPASIVNASLNLARTAQVVYQHGDDNTVTSVNGHIERLFCNPLT

SEQ ID NO: 163 - protein, 412 aa, Citrus unshiu
MQPEENLFENALAFYVCIEASYLATQDEDILFQAMEFTKTELTQSVSLMDSQSSRHVVQALALPRHLRMSRSEAGNYINEYSQSWNHDQTLLQLAKSDFNMVQSLHQRELAEIKRWWKQLGLVDKLGFGRDRPLECFLWTVGIFPEPYYSNCRIELAKTIALLLVIDDIFDTYGSLSDLVLFTEAIQRWDLGAMEHIPEYMKICYMALYNTTNEISYRILKDHGWNVVPQLKRTWIDIFKAQLSEAKWFSEGYVPTQEQYLRNGVTTGGTYMALVHAFCLMGQDVTKETLAMMEPYPNLFSCSGKILRLWDDLGAAREEQERGDVASSIECYMREKTISCEEEARKHIRQLIRSLWVELNGMLVAPAALPASIVNASLNLARTAQVVYQHGDDNTVTSVNGHIERLFCNPLT

SEQ ID NO: 164 - protein, 576 aa, Glycine soja
MTSSLESMEAWAAASLALTVSRRSTQAAKSSVYIIKERQVEPIVISRGRRERLNYLVPSQTYLGTKDLDQVIRKGQEALLNSSDPLRTLKIIDTIQKLGIEHHFEKEINLQLGRVGDWDTAEDLFATALQFRLLRHNGWPTCSDVFNKFLDKSGNFKESVTRDIWGMLSLYEASYLGAKGEEVLQQAMDYSRAHLCQSLPHLSPKVRSIVAEALKLPRHQRMVGLEAKNYMVEYSQASNQIPALLKLARLDYDMIQSMHQKELAEISRWWKDLGLIERLGFGRDGPRECFLWALGIFPEPRHSSCRIELAKAICVLQVIDDVFDTYGTLDELVLFTKAIKRWDLDAMEQLPEYMKICYMALYNTTHEIAYKIQKDHSLTVVACLKITWIDLIEAYLKEANWFNNKHVPTFQQYLDNGVISSGSYLALVHATFLIGDDLSKETIFMMNPYPRLFSCSGKILRLWDDLGTSRDEQERGDNACSIQCLMKQNNISDENVARKLIRQLIDNLWPELNGLTMTTNLPLSVMRASLNMARTSQVIYRHGDDQNMPTVDEHVQTLLFTPSINYRDENDINHVI

SEQ ID NO: 165 - protein, 542 aa, Cynara cardunculus var. scolymus
MCLSFSTLPSSTIAVPLNRDNDSLLHVYQPKAILPKAVVYDRIEQLKENTRRALMSISDPITRMELIDTIQRLGVGHHFDEEMHEILENLTEDLPDDNLYAVALCFRLQRHNGLHTNPDVFQNFMDANGKFKMSSSDDIEVLLSLYEASYLGANGEDILSQAKEFTTMQLTSLVSQLNPKLGTKVLLSLGLPRHLRMTRLEARRYIDEYGNEDDHNPIVLELAKLDYNHVQSLLQRELVEVTRWWEHLGLLKKLSFVRDRHLECFLWTVGVLPEKKYSGGRIELAKIIAILLVIDDIYDIYGSYEDLVLFTEAIRRWDLSEMEHLPEYMKISYTALYNTTSEICHKILKEHGLSVEPFLHQTWIDMVEAYMVEVEWVRSGTMPTFEDYIKNGVTTSGTCMALVHLFFLISEGVTEENMRHLLDPYPKFFSLAGTILRLWDDLGTSKEEQERGNVASSIQLLMREKNITSEEEGRKKILQLINELWKDLNTELVTPDALLLPMIKVALNMSRASQVVYQHNEDSYLTSVESQVQYLFFKPIDI

SEQ ID NO: 166 - protein, 484 aa, Dorcoceras hygrometricum
MKLIDNLQWLGLGHHFEDESNLWLEKLSGESASVDEDDLHSTALLFRLLRQHMKPINCDILEKFTRDQNIRDSLIKDKEGLLSLYEASYLGSNDEGVLSEAMKFTETLLIKSPVRPECDLSQRIGRALELPRHRRMVRLESRSRIKEYGMRTSQSSRLLQLAKLDYNKVQLLHQMELAQFTRWWKQLGLADKLGFVRNSTAECFLWTVGLFPHPKYSGVRVEMAKVIAILLAIDDVFDKYGTMNDLSLFTLAIQKWDLDAIETLPEYMKMCFMALYNTTREIANKVLKEHGVDIHHFLARSWIDTIEAFMIEFKWFSRREEPISAEDYMENGAATAGAYMALVHAFFLMGEGLTNHNIKLMSKPYPELFSASGRILRLWDDLGTSKEEEDRGDSASIIGILMEEKNLSSENEARQHIKQTILNLWKDLNGNLSTDSINPLPLPIINVCFNMCRTAQVFYQHQEYSYVSNVGRMADVIFFEHIGI

SEQ ID NO: 167 - protein, 518 aa, Dorcoceras hygrometricum
MKRSTIGIEELTEKARKELQILNYIEPVRGMILIDNLQWLGIGYHFEDEINLWLDKLSEWDCGEDDLHATALRFRLLRQQLRPTSCGSVFENILEDHKKRKSKPSLNQVEGLLNLYEASYLGASGEEILSEAMKFAETQLASLVNGTCGTADGNLYRRISLALELPRHHRMVRLESRRHIEDCSTHIHCSPSMHLVELAKLDYNRVQLLHKMELEEFRRWWRQLGLVGELSFARDPEAECFFWVVGCFPDPRHSGVRMEMAKTIAILITIDDVFDKHGTIDELLLFTHAVQRWDVDAIENLPDYMKICYMALYKTTTEIAQKILKQHGIDVLHFLSRAWIDTIEAYMIEAKWFQNGQIPSVEDYIENGTTTGGSYMALVHAFFLMGEGITNHNMQLMRKPYPKLFSTSGRILRLWDDLGTSKEEQDFGDNSSLIPVLMKEKNLSSEDEARRCIKQFIRQSWGELNTNLLESNIWPLSLINVCFNMCRTSEAIYHHQESSYLSSFKRTAKIKLLEPITN

SEQ ID NO: 168 - protein, 454 aa, Helianthus annuus
MNTSDSTMTLKLIDTIQRLGVGYYYEEEIKKILKKLTHVLPKDDLYTVALHFRLQRHYGLHTNPAEVFRIFMDENGELKKSSSEDIKGVLSLYEASCLGSSGEDFLLHHKEITRRHLSRSVSKLSPKLHKNVVEGLKLPRHMRMERLEARRYIEEYGNEDDHNPFVLEFAKWCEHLGLFCKLVFVRDRHVECFLWTVGLLPEPSFSGSRIELAKTIAIMLVIDDIYDTYGSYDDLVLFTEAIKRWDLNAIEQLPEYMKICYQALYNTNNEICDKWIDMAEAYMVEAEWVKRGSIPNLNDYIENGVTTSGTYMALVHLFFLISYGLTTENMKHLLDPYPKFFTMAGTILRLWDDLGTIKEEEERGDMLSSIHLLMKEENITCEEEGREGILQMIYALWNDLNVELLTPDAVLFPMIKVALNMSRTSQVVYQHNDDSYLLSVKDHVQSLFYEPVDI

SEQ ID NO: 169 - protein, 400 aa, Actinidia chinensis var. chinensis
MLSLYEASYLGAYGEDILSHAMEFTDSRLKQSVPFMAPQLGKHVSQALELPRHLRMERLEASRFIAEFGRESDQSSQLLELAKMDYNKVQSLHQTELAEISRWWKQLGLVDKLSFGRDRPLECYLWSVGLLPEPKYSDCRIELAKTVAILLVIDDIFDTYGSLDELVLFTQAIRRWDLSAMEQLPQYMKICYMALFNTTNEIGYKVLKDHGWSVVPHLKRTWIDMIEAFLVEANWFSNGYVPNLEEYLENGVTTAGSYMALVHLFFLIGKGVTKETIGMMDPYPKLFSSSGRILRLWDDLGTATDEQERGDVASSIDCFRREKNLSTEGEARNHVKKHIRSLWKELNGELMAPKALPLPLIKTSFNMSRTAQVIYQHGDNNTFPCVDDCVQSLFFTPIGF

SEQ ID NO: 170 - protein, 541 aa, Cinchona ledgeriana
MCMPSQTLTQPIATPLITDNDSLLKYLRQPLMLPHEVDDSTKRKELLERTRRELRSTTEPLEAMKLIDTLQRLGIAYHFEDDMNVILSSFSSDGQSDEDLFTAALRFRLLRHNGHKISPDIFQRFKDHNGKFKDSLKEDTLGILSLYEASHLGANGEDILLEAMEFSEAHLKKSHPKLEPLPAKHVSKALELPRHRRMARLEARRYIEEYSTESGHNPDLLELAKLDYNKVQSLHQMELSEITRWWKQLGLVDKLTFARDRPLECFLWTVGILPEPKYSSCRIELAKTIAILLVIDDIFDTHGTVDELVLFTNAIRRWDLEAMEELPEYMKICYMALYNTTNEICYKILKEKGWSVLPYLKSTWIDMIEGFMMEASWYSNGQIPNMEEYVENGVTTAGAYMALVHLFFLIGQGVTQDNVKLLMKPYPKLFSSSGRILRLWDDLGTAKEEQERGDLASSIQLFMRENNITCDEEGRKRILLLIDNLWKDLNWELVSRNELPLSIIKAAFNMARASQVVYQHEEDSYFSSVDNYVQALFFTPI

SEQ ID NO: 171 - protein, 491 aa, Lonicera japonica
MQQESSNPTDKLKLIDTLQRLGVAYHFEEDINSLLQGFSNGQPNENEYDPFTTSLRFRLLRHNGYHVSTDVFKKFMDKNGKFKESLGGDLMGMLSLYEASHLGANGEDILSEAMKFTETKLKESAAHVAPQIRRQILQSLELPRHLRMARLESRRYIEEYGRESGHNLALLELAKLDYNNVQSLHQLELAEISRWWKHLGLVDKLTFARDRPLECFLWTVGLLPEPKHSGCRIELAKTIAILLVIDDIFDTHGSFDQLVLFTNAIRRWDLNAMEELPEYMKICYMALYNTTNEICYKVLKENGWSVLPYLKRTWIDMIEGFMLEAEWLNSGHVPNLEEYIENGVTTAGSYMALVHLFFLIGEGVTDDNVKLLLDPYPKLFSCSGRILRLWDDLGTAKEEQERGDVASSIQLFMRENNVSSEGEARKQIIEIIQGLWKELNGELMGPNALPLPIIKTSFNMARTSQVVYQHDEDSYFSSVDSYVQSLFFTPI

SEQ ID NO: 172 - protein, 557 aa, Cinchona pubescens
MSSKKPSHICMCMPMPSTTSTQLIATPLIRDNESLLKYLRQPMVLPHEVQPMVLPHEVDDGTMRKELLEITRRELISTPEPLEAMKLIDTIQRLGLAYHFEDEMNAILSGISSKIPYEHEDLLTAGLRFRLLRHNGQKISPDIFKKFMDSNGKFKESLKEDTIGLLCLYEASHMGANGEDILLEALEFSESNIRRSLSSLQPQLARKVSQALELPRHRRMIRLEARRFIEEYGQESGHNPDLLELAKLDYNKVQSLHQMELSEISRWWKQLGLVDKLTFARDRPLECFLWTVGLLPEPKYSACRIELAKTIAILLVIDDIFDTHGTIDELVMFTNAIRRWDLDAMEELPEYMRICYMALYNTTNEICYKVLKENGWSVLPYLKATWIDMIEGFMMEASWYNNDVVPNMEEYVENGVTTAGAYMALVHLFFLIGQGVTQESVKLLMKPYPKLFSCSGRILRLWDDLGTAKEEQERGDLASSIQLFMKENNIKSDEEGRKGILQLIHNLWKDLNSELVSRNAMPLAIIKAAFNMARASQVVYQHEEDSYFSSVDNYVKA

SEQ ID NO: 173 - protein, 531 aa, Nepeta mussinii
MAATTTSPNLAPVVHNNDHMLEIVESTKKREYLVEKITEKLTEASSEKLKLIDEIQRLGIGYHFEDVIKSIMQVQCSAFSTEEDLFTTALRFRLLRQAGFHVIPEVFTRFKDKSGNFKESLGGDTLGLLSLYEASHIGVDGERMLEDARQFTESYLRQSLAKLAPRLRGEVGQALEVPRHHRMVRLEARRFIQEYGKQSGHDRDLLELAILDYNQVQAQHNMELTEIVRWWKELGLVDKLSFARDRPLECFLWSVGLLPDPKYSNCRIELAKNIAILLVIDDIFDTYGKMDDLIIFTHAIRRWDLEAIETLPEYMKICYMALYNTTNETCYRVLKDTGRSVFPYFISTWVDMIEGFMVEAKWFNGGIAPNLEEYIENGVSTAGAYMALVYLFFLIGYGVTDQNASLLIRKPYPKLFSAAGRILRLWDDLGTAKEEEERGDLASSIHLFIKEKNLSTEEDARSRILEEIFRLWKDLNGELISDNKVLPLSIIKVALDMARSSQVVYKHEGDNYFSSVDNYVEALFFTPLVSS

SEQ ID NO: 174 - protein, 531 aa, Nepeta cataria
MAATTTSPNLAPVVHNNDHMLEIVESTKKREYLVEKITEKLTEASSEKLKLIDEIQRLGIGYHFEDVINSILQVQCSAFSTEEDLFTTALRFRLLRQAGFHVTPEVFTRVKDKSGNFKESLGGDTLGLLSLYEASHIGVDGERMLEDARQFTESYLRQSLAKLAPRLCSEVGQALEVPRHHRMVRLEARRFVQEYGKQSGHDRDLLELAILDYNQVQAQHNMELTEIVRWWKELGLVDKLSFARDRPLECFLWSVGLLPDPKYSNCRIELAKNIAILLVIDDIFDTYGKMDDLILFTHAIRRWDLEAMETLPEYMKICYMALYNTTNETCYRVLKETGRTVFPYFKSTWIDMIEGFMVEAKWFNGGIEPNLEEYIENGVSTAGAYMALVYLFFLIGEGVTDQNASLLIRKPYPKLFSAAGRILRLWDDLGTAKEEEERGDLASSIHLFIKEKNLSTEEDARSRILEEIFRLWKDLNGELISDNKVLPLSIIKVALDMARSSQVVYKHEGDTYFSSVDNYVEALFFTPLVSS

SEQ ID NO: 175 - protein, 510 aa, Nepeta cataria
MESTKKREYLLEKITEKLQKITEASEKLKLIDEIQRLGIGYHFEDVIDNILQVQCSAFSTEEDLFTTALRFRLLRQAGFHVTPEVFTRVKDKSGNFKESIGGDTPGLLSLYEASHIGVDGEKMLEDARQLTEFYLRQSLARLAPRPRGEVGQALEVPRHHRMVRLEARRFIEEYGKQSGHDRDLLELAILDYNQVQAQHNMELTEIVRWWKELGLVDKLSFARDRPLECFLWSVGLLPDPKYSNCRIELAKNIAILLVIDDIFDTYGKMDDLILFTHAIRRWDLEAMETLPEYMKICYMALYNTTNETCYRVLKETGRTVFPYFKSTWIDMIEGFMVEAKWFNGGIEPNLEEYIENGVSTAGAYMALVYLFFLIGEGVTDQNASLLIRKPYPKLFSAAGRILRLWDDLGTAKEEEERGDLASSIHLFIKEKNLSTEEDARSRILEEIFRLWKDLNGELISDNKVLPLSIIKVALDMARSSQVVYKHEGDTYFSSVDNYVEALFFTPLVSS

SEQ ID NO: 176 - protein, 542 aa, Phyla dulcis
MCMSSSVSLPTATTSSSVITGNDALLKYIRQPMVIPLKEKEGTKRREYLLEKTARELQGTTEAAEKLKFIDTIQRLGISCYFEDEINGILQAELSDTDQLEDGLFTTALRFRLLRHYGYQIAPDVFLKFTDQNGKFKESLADDTQGLVSLYEASYMGANGENILEEAMKFTKTHLQGRQHAMREVAEALELPRHLRMARLEARRYIEQYGTMIGHDKDLLELVILDYNNVQAQHQAELAEIARWWKELGLVDKLTFARDRPLECFLWTVGLLPEPKYSACRIELAKTIAILLVIDDIFDTYGKMEELALFTEAIRRWDLEAMETLPEYMKICYMALYNTTNEICYKVLKKNGWSVLPYLRYTWMDMIEGFMVEAKWFNGGSAPNLEEYIENGVSTAGAYMALVHLFFLIGEGVSAQNAQILLKKPYPKLFSAAGRILRLWDDLGTAKEEEGRGDLASSIRLFMKEKNLTTEEEGRNGIQEEIYSLWKDLNGELISKGRMPLAIIKVALNMARASQVVYKHDEDSYFSCVDNYVEALFFTPLL

SEQ ID NO: 177 - protein, 521 aa, Vitis vinifera
MSEADSSTRRMKEVKERTWEAFYRAWDSRAAMEMVDTVERLGLSYHFEDEINALLQRFCDWNASEDLFTTALRFRLLRQNGFPTHSDVFGKFMDKNGKFKESLTEDIWGMLSLHEASHLGAKNEEVLAEAKEFTRIHLIQSMPHMEPHFSSHVGRALELPRHLRMVRLEARNYIGEYSRESNPNLAFLELAKLDFDMVQSLHQKELAEIVRWWKQLGLVDKLDFARDRPMECFLWTVGIFPDPRHSSCRIELTKAIAILLVIDDIYDSYGSLDELALFTDAVKRWDLGAMDQLPEYMKICYMALYNTTNDIAYRILKEHGWSVIEDLKRTWMDIFGAFLAEAYCFKGGHVPSLEEYLTNAVTTGGTYMALVHAFFLMGQGVTRENMAMLKPYPNIFSCSGKILRLWDDLGTAREEQERGDNASSIECYKREREMDTVLEDEACRKHIRQMIQSLWVELNGELVASSALPLSIIKAAFNLSRTAQVIYQHGDDNKTSSVEDHVQALLFRPVSSNGHAQITMH

SEQ ID NO: 178 - protein, 547 aa, Catharanthus roseus; identical to SEQ ID NO: 141

SEQ ID NO: 179 - protein, 526 aa, Olea europaea
MAENGAMYNYIRQPVIVTPEVDDGTKHSELVERTRRELQRSTKPVETLKLIDNLQRLGIAYYFEDDINAILDQFSDGLPDEDLFTTALCFRLLRDQRLQTGSDVFLKFMEKNMKFKEHLAQDTIGLVSLYEASSMGANGEEILSEAKEFTEMHLRQSMPQLAPQLRRQVSSALELPRHLRMARLEARRYIEEYGNESDHDPALLELARLDYNKVQLQHQMELAEITRWWKQLGLVEKLSFARDRPLECFLWTVGLLPEPKYSSCRIELAKTIAILLVIDDIFDTYGKMEELVLFTEAIQRWDLDELETLPPYMRICYMALYNTTNEICYKILKEYGFCVLPYLKSTWIDMIEGFMVEANWFNGGHGPNLEEYIENGVSTAGAYMALVHLFFLIGEGVTNENIAKLLRKPYPKLFSAAGRILRLWDDLGTAKEEEERGDLASCMQILMREKNIDCENEGRNYILKAINGLWKDLNDELISPNAMPLAITKVALNMARAFEVVYKHEEDSYFSSVDNYVQALFFTPIN

SEQ ID NO: 180 - protein, 504 aa, Valeriana officinalis
MIMELVEATRRTLRNESSDSTEKMRLIDSLQRLGLNHHFEQDIKEMLQDFANEHKNTNQDLFTTSLRFRLLRHNGFNVTPDVFNKFTEENGKFKESLGEDTIGILSLYEASYLGGKGEEILSEAMKFSESKLRESSGHVAPHIRRQIFQSLELPRHLRMARLESRRYIEEDYSNEIGADSSLLELAKLDFNSVQALHQMELTEISRWWKQLGLSDKLPFARDRPLECFLWTVGLLPEPKYSGCRIELAKTIAVLLVIDDIFDTYGSYDQLILFTNAIRRWDLDAMDELPEYMKICYMALYNTTNEICYKVLKENGWSVLPYLKRTWIDMVEGFMLEAKWLNSGEQPNLEAYIENGVTTAGSYMALVHLFFLIGDGVNDENVKLLLDPYPKLFSSAGRILRLWDDLGTAKEEQERGDVSSSIQLYMKEKNVRSESEGRQGIVEIIYNLWKDMNGELIGSNALPQAIIETSFNMARTSQVVYQHEDDTYFSSVDNYVQSLFFTPVS

SEQ ID NO: 181 - protein, 504 aa, Valeriana officinalis; identical to SEQ ID NO: 180

SEQ ID NO: 182 - protein, 507 aa, Valeriana officinalis; identical to SEQ ID NO: 143

SEQ ID NO: 183 - protein, 539 aa, Pogostemon cablin
MMSTSSLPVGNEALLKYIRQPVVLPTEEDESIKRRDYLLEKTARRLRTSTGSVEKLKLIDTIQRLGIDYYLEDDINVVLRNEYYNGRSSEEDLFTTALRFRLLRHNGFQISSDVFMKFKDKNGKFKKWIAEDTIGLLSLYEASYMGAHGEKILEEAMEFSRSLLKRSLPQLPPKLHGQVAQALELPRHLRMARLEARRFVQQYAKQSDCDRDLLNLATLDYNKVQLQHQFELAEITRWWQQLGLVEKLTFARDRPLECFLWTVGLLPEPRYSTCRIEMAKTIAILLVIDDIFDTYGKMDELLLFTQAIRRWDLEAMDILPEYMKICYMALYNTTNEICYKVLKLNGWSVLSYLKSTWIDMIEGFMVEAKWLNGGGAPNLEEYLENGVSTAGAYMALVHLFFLIGEGVNDQNAPLLTKKPYPKLFSAAGRILRLWDDLGTAKEEQERGDVASSIEFVMREKEVESEEEGRRYILGEIYELWKDLNGELMSKNGMPLAIIKVALNMARASQVVYKHEEDTYFSSVDNYVEALFFTPLPSSI

SEQ ID NO: 184 - protein, 543 aa, Picrorhiza kurrooa
MSSAAPNVTQVVVGANDALLQYTHQPMLIPSEVDADTERRDYLLEKARQELSRTTKPTDKLKLIDMIQRLGIGFYLEDDINAILRTQFSVNVIDEEDLSATGLRFRMLRQNSFPISSDIFKRFQDQNEKFDETLTNDTLGVIELVRSIIHGEPKGEEILEEAMEFSKTRLKRSLSSLPAQIKADVGQALELPTHLRMARLEARRFIEQYATQSDHNPILLELATLDYNHVQSQHQMELVEITRWWKQLGLVDQLSFARDRPLECFLWTVGLLPEPKYSSCRIELAKTIAVLLVIDDIFDTYGKMDDLILFTDAIQRWDLGAMESLPEYMKICYMALYNLTNEICYKVLKENGWTVLPYLKSSWIDMIEGFMVEAKWFNGGCAPNLEEYVENGVSTAGSYMALVHLFFLIGEGVTEQNAQLLMKKPYPKAFSSAGRILRLWDDLGTAKEEQERGDLASSINLFMKERNLATEEEGRECILEDIYGYWKDLNGELVSQKEMPLAIIKVALNMARASQVVYKHEEDSYFSNVDNYVQALLFTPLII

SEQ ID NO: 185 - protein, 545 aa, Gentiana rigescens
MCMPIPTSTMSQPIATPLIKDNESLLRYLRQPMVLPHELDDDTKRRELVERTRRELQSMSKPLEAMKLIDTLDRLGIAYHFEDDINQSLTRFSSGQPNEDLLTTSLRFRLLRHNGHSISSEIFGKFLVQNGKFEESLGEEDILGLLSLYEASYMGGGEEKILMEAMEFSEAHLKSSIAKLTPQLSRQVAQSLELPRHRRMARLEARRYIEEYGKFENNYNPDLLELAKLDYNKVQSLHQMELSEITRWWKQLGLVDKLPFARDRPLECFLWTVGLMPEPKYSGCRIELAKTIAILLVIDDIFDTHGTIDELVLFTNAIRRWDLQAIEELPEYMRICYMALYNTTNEISYKILKENGWSVRPYLKETWIDMVDGFMMEASWFTNGQVPKMEEYLENGVTTAGSYMALVHCFFLIGKGVSEESVKLLMNPYPKLFSNAGRILRLWDDLGTAKEEQERGDLASSIVLFMKEKNITSDEEARESILKLIHNLWKEMNGELVSRNALPLEIKKVAFNMARASQVVYQHEEDSYFSSVDNYVKALFFTPLI

SEQ ID NO: 186 - protein, 541 aa, Camptotheca acuminata
MCTTLPSPATSTATIGDTDSLLKSQRQFTVYLPAHEADKDRKIEEIMEKTQGELEKTSDPTSVMKFIDTLERLGIAYHFEEEINSLLQGFLANGYSHYPQDLFTTALRFRLLRHNGYHISADVFQKFVDKNGKFKESLREDTQGMLSLYEASYLGANGEDILSQAMEFTETHFKQSIPLMAAVPQLEQALELPRHLRMARLEARRFIEEYIRESDHSSALLELAKLDYNKVQLLHQSELNEISRWWKQLGLVENLGFGRDRPLECFLWTVGILPEPKYSGCRIELTKTIAVLLVLDDIFDSFGTLDELVRFTHAIRRWDLSAMEQLPEYMKVCYMALYNTTNEIGYKILKEHGWNVVPYLKRTWIDMIEGFQAEANWCSSGYVPSLEEYIENGVTTAGSYMALVHLFFLMGQGVTDETIGMLEPYPKFFSSSGRILRLWDDLGTASEEQERGDIASSIELFMREKDLSSQGEARKYVKQVIYSLWKELNGELMASKAMPLPLIKAAFNMARTSQVIYQHGDDNSFPSVDQCVQSLFFTPIL

SEQ ID NO: 187 - protein, 535 aa, Osmanthus fragrans
MSPSVTPLIPTENDALYNYIRQPVIVTPEVDEGTKHRELLEKTRRELQRSTKPVETLKLIDKLQRLGIAYYFEDDINAILDRFSDCLPNEDLFTTALCFRLLRDNGYKTDSDVFLKFMEKNKKFKGHLAQDTIGLLSLYEASYMGANGEEILSEAKEFTEIHLRQSMPRLAPQLRRQVGSALELPRHLRMARLEARRYIEEYATESEHDPALLELARLDYNKVQLQHQMESTEISRWWKQLGLVEKLSFARDRFLECFLWTVGLLPEPKYSSCRIELAKTIAILLVIDDIFDTYGKMEELVLFTEAIQRWDLDELETLPPYMRICYMALYNTTNEICYKILKAYGFCVLPYLKSTWIDMIEGYMVEANWFNGGHGPNLEEYIENGVSTVGAYMALVHLFFLIGEGVTNENITKLLRKPYPKLFSTAGRILRLWDDLGTAKEEEERGDLASCMQILMREKNIYCENEGRKYILKAINSLWKDLNDELISPNAMPLAITKVALNMARASEVAYKHEEDSYFSSVYNYVQALFFTPIN

SEQ ID NO: 188 - protein, 507 aa, synthetic construct; identical to SEQ ID NO: 143

SEQ ID NO: 189 - protein, 525 aa, Phaseolus lunatus
MTQKVPSRTNPMMTSLEQIKIRIQEVLLKSNDSLETLKLIDNIQRLGIEHHFEEEINLQLGKVGNCNNSQDLSAAALQFRLLRHNGWSTSSDVFNNFLDKSGNFKESFNRDIWGMLSLYEASYFGAQGEEVLQHAMEFSRAHLHLSLPLLSPEVGRVIVEALKLPRHQRMSRLEAKNYMVQYSTESSQIPALLEFARIEYDTVQSMHQSELAEISRWWKNLGLIERLGFGRDGPRECFLWMLGVFPEPCYSHCRIELAKAICILQVLDDMFDTYGTLDELILFTEAVQRWDLDAMEKLPEYMKICYMALYNTTHEIAYRIQKDHGQTVVACLKRTWIDLLEAYLIEAKWFNNKYVPTFGEYLDNGVISSGSCLALVHATFLIGDNLSKETISMMSPYPRLFSCSGEILRLWDDLGTSKEEQKRGDNACSIQCLMKENYILDETFARKHIKQVLGNLWPELNGLVMATTTLPFSIRKASLNMARTSQFIYQHGDDQTMPTVNDLVKELLFTPSSKSGEESDTYCVV

SEQ ID NO: 190 - protein, 529 aa, Unknown
  geraniol synthase
MISTISQPTRKEPATTKPEIMEELHEGTRKELLTSSSPIATMKLIDSIQRLGVGYYFEEEINTLLDRFLDLETTEDLLATALRFRLLRDNCFPAHSDVFGKFMNKDGKFKESLRKDVWGLLSLYEASYLGTKDEVELVEAMEFTKTCLEEQSIPLMAHKLSRHVSQALDLPRHLRMPRLEARNYIHEYSLESNNSPPLLELAKLEFNAVQSLHQKELIEIVRWWKQLGLVDKLGFARDRPLECYLWTVGIFPEPYNSTCRIELTKTIAILLVIDDIFDTYGSLPDLILFTEAVRRWDLNAMESLPEYMKICYMALYNTTNDIGFMILKRHGLSIVPHLKRTWIDMFEAFLTEAKWFNSGYVPTLEEYLDNGVTTGGTYMALVHSFFLMGQGVNKETVTMMEPYPDLFSLSGRILRLWDDLGTAREEQERGDVACSIECLMREKRISCDDEGRKQVRQLIRSLWTELNGELIAPSAMPLSIINASLNLARTAQVVYQHGDDKKGSSVDNQVQALIYIPISFPKRRDLKLL

SEQ ID NO: 191 - protein, 513 aa, Vigna angularis
MAMKQNKLSIKSVAFRDKVPIQIDPGKKKLEQVKRSSQETLLNSSDPTKTLKIIDNIQRLGIGHHFEEEINVKLGKVADCDFSQDLCSTALQFRLLRHNGCHASSDVFKKFLDHSGNFKESITTDIWGMLSMYEASYLGAKGEEVLQQAMDFSSAHLQQSLPLLSPDVGNHVVRALTLPRHLRMSRLEARNYIEEYSQVSSKMPYLLEMAKIDNAMVQSMHQKELADISRWWKDLGLVERLGFARDKPAECFLWTVGVFPEPCYSNCRIELAKTICILLVMDDIFDTYGTSDELVLFTEAIKRWDLDAMEQLPEYMKISYLALYNTIQEIACRIQMEHGQTVLSCLKRTWIDIFEAFLKEAKWFSNKYVPTFEEYLANGVISSGSYMALVHATFLIGDGISKETISLMNPYPRLFSCSGEILRLWDDLGTSREEQERGDNACSLQCLMTENNISDEIVARKQIRGFIRNLWPELNSLALTTASLPFSVIKASLNMARTSQVIYQNGDDQNTFT

SEQ ID NO: 192 - protein, 466 aa, Vitis vinifera
MSEADSSTRRMKEVKERTWEAFYRAWDSRAAMEMVDTVERLGLSYHFEDEINALLQRFCDWNASEDLFTTALRFRLLRQNGFPTHSASDVFGKFMDKNGKFKESLTEDIWGMLSLHEASHLGAKNEEVLAEAKEFTRIHLIQSMPHMEPHFSSHVGRALELPRHLRMARWWKQLGLVDKLDFARDRPMECFLWTVGIFPDPRHSSCRIELTKAIAILLVIDDIYDSYGSLDELALFTDALPEYMKICYMALYNTTNDIAYRILKEHGWSVIEDLKRTWMDIFGAFLAEAYCFKGGHVPSLEEYLTNAVTTGGTYMALVHAFFLMGQGVTRENMAMLKPYPNIFSCSGKILRLWDDLGTARVGDNASSIECYKREREREMDTVLEDEACRKHIRQMIQSLWVELNGELVASSALPLSIIKAAFNLSRTAQVIYQHGDDNKTSSVEDHVQALLFRPVSSNGHAQITMH

SEQ ID NO: 193 - protein, 537 aa, Coffea arabica
MCMPTPTATQPIATPLIRDNESLLKYLRQPSVLPHEVDDSRKELLGRTRRQLRSTSEPLKAMNLIDTLQRLGLAYHFEDDMNAILSQLSSSGQSDGDLLTTALRFRLLRHNGHKIVQKFMDKNGKFKDSLKEDTMGLLSLYEASHLAANGEDILLEAMELTEAHLKQSLPSLPTQLARKVSSALELPRHRRMARLEARRYIQEYSEEIGHDPNLLELAKLDYNKVQSLHQMELTEISRWWKQLGLVDKLTFARDRPLECFLWTVGILPEPKYSNCRIELAKTIAILLVIDDIFDTHGTIDELVLFTNAIRRWDLEAMEGLPEYMRICYMALYNTTNEICYKILKENGWSVLPYLKATWIDMIEGFMLEASWYNNGQVPNMEEYVENGVTTAGAYMAMVHLFFLIGQGVTEENVKLLMKPYPKLFSCSGRILRLWDDLGTAKEEQERGDLASSIQLFMRENNITCDEEGRKRILQLIDNLWKDLNWELVSRDAMPLAIIKAAFNMARSSQVVYQHEEESYFSSVDNYVESLFFTPIIN

SEQ ID NO: 194 - protein, 541 aa, Coffea canephora
MCMPTPTATQPIATPLIRDNESLLKYLRQPSVLPHEVDDGRKELLGRTRRELRSTSEPLKAMNLIDTLQRLGLAYHFEDDMNAILSQLSSSGQSDGDLLTTALRFRLLRHNGHKISSDIFQKFMDKNGKFKDSLKEDTMGLLSLYEASHVGANGDDLLLEAMEFTEAHLKQSLPSLPTQLARKVSSALELPRHRRMARLEARRYIQEYSEEIGHDPNLLELAKLDYNKVQSLHQMELTEISRWWKQLGLVDKLTFARDRPLECFLWTVGILPEPKYSNCRIELAKTIAILLVIDDIFDTHGTIDELVLFTNAIRRWDLEAMEGLPEYMRICYMALYNTTNEICYKILKENGWSVLPYLKATWIDMIEGFMLEASWYNNGQVPNMEEYVENGVTTAGAYMAMVHLFFLIGQGVTEENVKLLMKPYPKLFSCSGRILRLWDDLGTAKEEQERGDLASSIQLFMRENNITCDEEGRKRILQLIDNLWKDLNWELVSRDAMPLAIIKAAFNMARSSQVVYQHEEESYFSSVDNYVESLFFTPIIN

SEQ ID NO: 195 - protein, 529 aa, Glycine soja
MAFSEKVPSQTYYPGMKDFDQVKRKSQEALLNSSDSLRTLEIIDTIQRLGIEHHFEKEINLQLGRIGDWNAAEDLFATSLQFRLLRHYGWPTCSDVFNKFLDQSGNFKESVTRDIWGMLSLYEASYLGAKGEEVLQQAMDYSRAHLCQSLSDLSPKVGSIVVEALKLPRHLRMGRLEAKNFMVEYSQASNQIPALLELARLDYDMIQSMHQKELAEISRWWKELGLIERLGFGRDGPRECFLWVLGIFPEPRYSNCRIELAKAICILQVLDDMFDTYGTLDELILFTKAIKRWDLDVMEQLPEYMKICYMALYNTTHEIAYKIQKDHGQTVVACLKRTWIDLIEAYLKEAKWFNNKYVPTFQQYLDNGVISSGSYLALVHASFLIGDDFSKETISMMNPPYPRLFSCSGEILRLWDDLGTSRDEQERGDNACSIQCLMTENNISDENVARRHIRKLIKNLWPELNGLTMITTTLPLSVMRASLNMARTSQVIYQHGDYQSMLTVDDHVQALLLTPSINYQDESDINHVI

SEQ ID NO: 196 - protein, 518 aa, Glycine soja
MAFNDNKVPSQIDLRTNNFEQVKRNSQMALLNSSDPIKILKMIDTIQRLGIEHHFKEEINVQLGKVGDWDVTQDLFGTALQFRLQRHNGWPSCSDVFKKFLDKSGTFKESITNDIWGMLSLYEASYLGAKGEEVLQQAMDFSKAHLHQSLPHLSPELRKLVAKALTLPRHLRMGRLEARNYMEKYSQATNQIPALMELAKLDFAMVQSMHQKELAEISRWWKNLGLVERLGFARDRPAECFLWTVGTFPEPRYSNCRIELTKTICILLVMDDIFDTYGTLEELVLFTEAIKRWDLDAMEQLPEYMKICYMALFNTTHEIAYKIQKEHGQTVVACLKRTWIDIFEAFLKEAKWFNNGYIPTFKEYLDNGVISSGSYMALVHATFLIGDSLSKETISIMKPYPRLFSCSGEILRLWDDLGTSREEQERGDNACSIQCLMTENNLSDENVARKHIRQLIQNLWPELNGLAMTTTALPSSVMKASLNMARTAQVIYQHGDDQNTFTVDDYVKTLILTPSSNY

SEQ ID NO: 197 - protein, 491 aa, Vigna angularis
MTQTIPTMTSLEQLKIKSQEVLLDSSDSLRTLKLIDTIQRLGIDHHFEEEINLQLGRVADCNNAQDLFATALQFRLLRHNGWSTSSDVFNKFLDKSGNFKESVTGDVWGMLSLHEASYLGAEGEEVLQHAMECSRAHLHQSLPHLSPEVGRVVVEALKLPRHQRMVRLEAKNYMVQYSKESSQIPALLELARLDYDMVQSMHQKELAEISRWWKDLGLIERLGFGRDGPRECFLWALGVFPEPRHSNCRIELAKAICILQVIDDMFDTYGTLDELILFTEAVQRWDLDAMEKLPEYMKICYMALYNTTHEIAYRIQRDHGQTVVASLKRTWIDLLEAYLKEAKWFNDKYVPAFEEYLDNGVISSGSCLALVHATVLIGENLSRETISLMSPYPRLFTCSGEILRLWDDLGTSKHIRRLLGNLWPELNGLAMATTTLPSAVTKASFNMARTSQFIYQHGDDQQMPTVDDLVQALLFTPSDKYGEESDINCVV

SEQ ID NO: 198 - protein, 433 aa, Glycine max
MAFNDNKVPSQIDLRTNNFEQVKRNSQMALLNSSDPIKILKMIDTIQRLGIEHHFKEEINVQLGKLGDWDVTQDLFGTALQFRLQRHNGWPSCSDVFKKFLDKSGTFKESITNDIWGMLSLYEASYLGAKGEEVLQQAMDFSKAHLHQSLPHLSPELRKLVAKALTLPRHLRMGRLEARNYMEKYSQATNQIPALMELAKLDFAMVQSMHQKELAEISRWWKNLGLVERLGFARDRPAECFLWTVGTFPEPRYSNCRIELTKTICILLVMDDIFDTYGTLEELVLFTEAIKRWDLDAMEQLPEYMKICYMALFNTTHEIAYKIQKEHGQTVVACLKRTWIDIFEAFLKEAKWFNNGYIPTFKEYLDNGVISSGSYMALVHATFLIGDSLSKETISIMKPYPRLFSCSGEILRLWDDLGTSRVLIHLDTHLFPS

SEQ ID NO: 199 - protein, 542 aa, Cajanus cajan
MSSMFQPRNLSLKTSRPPMIYNNLSIKSIAFRDKVPSQTDPSTRNLEQVKRRSQELLLNSRDPIKTLKIIDNIQRLGIGHHFEEEINVQLGRVGDWDVTQDLLATALQFRLLRHNGWPARSDAFKKFLDNTGNFQESITNDIRAMLSLYEASYLGAKGEEILQQAMDFSTAHLHQSLPHLSPELGRIVARSLTLPRHLRMARLEAKNYMEEYSQASSQIPSLLELAKLDHVMVQMMHQKELAEISGWWKKLGLVERLGFARDRPEECFLWTVGVFPEPYYSTCRIELTKTICILLVMDDIFDTYGTLDELILFTKAIKRWDLDAMEQLPEYMKICYIALYNTTHEIANKIEKAHGESVVACLKRTWTDIFEAFLKEAKWFNNKYIPTFREYLDNGVISSGSYMAMVHATFLVGDGLSKETISMMKPYPRLFSCSGEILRLWDDLGTSREEQERGDNACSIQCFMTENNISDENVARKHIRELIRNLWPELNGLAMTTSALPLSVMKASLNMARTAQVIYQHGDEQNAFTVDDYVKTLLFTQH

SEQ ID NO: 200 - protein, 626 aa, Cajanus cajan
MLQTLRPGTMRTKLSIKSISLPDQFGPRVIYTRPVGFLPINHEFGLSSSYLYSANRIFTDQSRVWSVFELFILAQSDFYRSITSLVFELFILAQSEFCRQSRVCLRVIYTHPIELLPTITSLYGKKSLEQLKRSSQEALLNTSDSLRTLKTIDTIQRLGIEHHFKEEINLQLGRLTNWEPVENLFATALQFRLLRHNGWPTRSDVFNKFLDKSGNFKESVTKDIWGMLSLYESSYLGTKDEEVLQQAMDFSRAHLHRSLPYLSLEVKNIVGGALMLPRHLRMARLEAKNYMVECRKTSSQIPDLLKLARLDFDISQSMHQKELAEISRWWKNLGLVESIGFGRDKPGECFLWVLGILPEPCYSNCRIELAKAISVLQVMDDMFDTHGKLDELVPFTMAIRRWDLDAMEQLPEYMKICYMALYNTIHEIAYRIQKEHGKTVITCIKRTVHIFEAYLKEAKWFNNKYVPTFREYLDNGVISSASFMALVHSTLLIGDNLSEKTISMMIPYPRIFSCSGEILRLWDDLGTSRDEQKRGDNACSIQCLMAENNISDENVARKHIRKLIGNLWLELNGLALTTTDFPLSVARTSLNMARAAQAIYQHGDDQSSLTVDDQVQALLFTPSANY

SEQ ID NO: 201 - protein, 521 aa, Vitis vinifera
MSEADSSTRRMKEVKERTWEAFYRAWDSRAAMEMVDTVERLGLSYHFEDEINALLQRFCDWNASEDLFTTALRFRLLRQNGFPTHSDVFGKFMDKNGKFKESLTEDIRGMLSLHEASHLGAKNEEVLAEAKEFTRIHLIQSMPHMEPHFSSHVGRALELPRHLRMVRLEARNYIGEYSRESNPNLAFLELAKLDFDMVQSLHQKELAEILRWWKQLGLVDKLDFARDRPMECFLWTVGIFPDPRHSSCRIELTKAIAILLVIDDIYDSYGSLDELALFTDAVKRWDLGAMDQLPEYMKICYMALYNTTNDIAYRILKEHGWSVIEHLKRTWMDIFGAFLAEAYCFKGGHVPSLEEYLTNAVTTGGTYMALVHAFFLMGQGVTRENMAMLKPYPNIFSCSGKILRLWDDLGTAREEQERGDNASSIECYKREREMDTVLEDEACRKHIRQMIQSLWVELNGELVASSALPLSIIKAAFNLSRTAQVIYQHGDDNKTSSVEDHVQALLFRPVSSNGHAQITMH

SEQ ID NO: 202 - protein, 523 aa, Vitis vinifera
MSEADSSTRRMKEVKERTWEAFYRAWDSRAAMEMVDTVERLGLSYHFEDEINALLQRFCDWNASEDLFTTALRFRLLRQNGFPTHSDVFGKFMDKNGKFKESLTEDIWGMLSLHEASHLGAKNEEVLAEAKEFTRIHLIQSMPHMEPHFSSHVGRALELPRHLRMVRLEARNYIGEYSRESNPNLAFLELAKLDFDMVQSLHQKELAEIVRWWKQLGLVDKLDFARDRPMECFLWTVGIFPDPRHSSCRIELTKAIAILLVIDDVYDSYGSLDELALFTDAVKRWDLGAMDQLPEYMKICYMALYNTTNDIAYRILKEHGWSVIEDLKRTWMDIFGAFLAEAHCFKGGHVPSLEEYLNNAVTTGGTYMALVHAFFLTRQGVTRENMAMLKPYPNIFSCSGKILRLWDDLGTAREEQERGDNASSIECYKREREREMDTVLDDEACRKHIRQMIQSLWVELNGELVASSALPLSIIKAAFNLSRTAQVIYQHGDDNKTSSVEDHVQALLFRPVSSNGHAQITMH

SEQ ID NO: 203 - protein, 518 aa, Glycine max
MAFNDNKVPSQIDLRTNNFEQVKRNSQMALLNSSDPIKILKMIDTIQRLGIEHHFKEEINVQLGKLGDWDVTQDLFGTALQFRLQRHNGWPSCSDVFKKFLDKSGTFKESITNDIWGMLSLYEASYLGAKGEEVLQQAMDFSKAHLHQSLPHLSPELRKLVAKALTLPRHLRMGRLEARNYMEKYSQATNQIPALMELAKLDFAMVQSMHQKELAEISRWWKNLGLVERLGFARDRPAECFLWTVGTFPEPRYSNCRIELTKTICILLVMDDIFDTYGTLEELVLFTEAIKRWDLDAMEQLPEYMKICYMALFNTTHEIAYKIQKEHGQTVVACLKRTWIDIFEAFLKEAKWFNNGYIPTFKEYLDNGVISSGSYMALVHATFLIGDSLSKETISIMKPYPRLFSCSGEILRLWDDLGTSREEQERGDNACSIQCLMTENNLSDENVARKHIRQLIQNLWPELNGLAMTTTALPSSVMKASLNMARTAQVIYQHGDDQNTFTVDDYVKTLILTPSSNY

SEQ ID NO: 204 - protein, 481 aa, Lupinus angustifolius
MCSTKSLEQVKRKIQETLLNSDRLGTLKIIDSIQHLGIGHHFEEEINALLGRVLDYDTAHDLFATSLHFRLLRHNGFPTSSDIFKKFCDKSGYFKESLSKDIWGMLSLYEASYLGAEGEELLHKAMDFSKVHLHNSISQLGPQVSMHIARSLILPRHLKMAKLEAKNYIHEYSHASNQIPALLELAKLDYDMAQSLHQRELAEICRQATLLLWWKELGLVGRLGFGRDRPAECFLWTLGIFPEPSYSNCRIELTKTICILLVMDDIFDTYGSLDDLILFTDAIRRIQKEHGVTVVAHLKRTWIDIFEAFLEEAKWFNKGYMPTFREYLNNGVISAGSYMAMVHATFLIGDGNSKENISMMKPYPRLFSCSGEILRLWDDLGTSTEEQERGDNACSIQCHMRENNISDENEARKHIREFIGKLWQELNGIAMNTNLPWSIVKASLNMARTAQVIYQHGDDKSTYSVDEYVQTLLFTPSPRNS

SEQ ID NO: 205 - protein, 545 aa, Handroanthus impetiginosus
MCSGVAPTSTTPIRINSSLQSTIPISPKLKQQQLRKVDLEYTKTNEELREKTRGTLQKALDPMAAMKLIDTLQWLGISYHYEEEIDFWLGKLSQWDADDDDLHATALRFRLLRQNARPVSSDVFKKFRVNGKFRKSISEDKEGLLNLYEASCLGTNGEDILSEAAKFTENELKLSSANGILPKHISRRVGRALELPRHMRMERLESRLYIDEYNIQENHSLLLLEQAKADYNEVQLLYQSELAEMSRWWKQLGLVEKLTFARDRPMECFLWTVGIFPEPKYSSLRVDLAKTVAILLVIDDIFDTYGTINELSLFKSAIQRWDLDAIEQLPQYMKICYMALYNTTNEIAYKVLREQGRNILPFLEKAWIDAIEAFMIEAEWFNNGHTPRVEDYLENGVTTSGAYMALVHAFFLMGEGLTIENVKLMAKPYPKLFSNSGRILRLWDDLGTAKEEQEKGDNASSISLLMKEKNMAHEDEARAYTMKLIHNLWKDLNTELLGSNMLPLPIIRACFNMSRTSQVIYQHQEDSYFSSVDKFVDLILFKPIA

SEQ ID NO: 206 - protein, 545 aa, Handroanthus impetiginosus
MCSGVAPTSTTPIRINSSLQSTIPISPKLKQQQLRKVDLEYTKTNEELREKTRGTLQKALDPMAAMKLIDTLQWLGISYHYEEEIDFWLGKLSQWDADDDDLHATALRFRLLRQNARPVSSDVFKKFRVNGKFRKSISEDKEGLLNLYEASCLGTNGEDILSEAAKFTENELKLSSANGILPKHISRRVGRALELPRHMRMERLESRLYIDEYNIQENHSLLLLEQAKADYNEVQLLYQSELAEMSRWWKQLGLVEKLTFARDRPMECFLWTVGIFPEPKYSSLRVDLAKTVAILLVIDDIFDTYGTINELSLFKSAIQRWDLNAIEQLPQYMKICYMALYNTTNEIAYKVLREQGRNILPFLEKAWIDAIEAFMIEAEWFNNGHTPRVEDYLENGVTTSGAYMALVHAFFLMGEGLTIENVKLMAKPYPKLFSNSGRILRLWDDLGTAKEEQEKGDNASSISLLMKEKNMVHEDEARAYTMKLIHNLWKDLNTELLGSNILPLPIIRACFNMSRTSQVIYQHQEDSYFSSVDKFVDLILFKPIA

SEQ ID NO: 207 - protein, 491 aa, Lactuca sativa
MALMTDSNPIILMELVDKIQRLGLGCTFEEDINKIMKYLVQGHPNDDLYTVSLRFRLLRHNGLHVNPDVFGSFMDANGKFKESLSEDIEALLSLYEASYMGADGEDILSEAREFTTRHLKKSVFKLTPLLRNKVLQSLKLPRHLRMERLEARMYIEEYGNEQDHIPILLELAKLEYNEIQILHQMEISEITRWWKHLGLTDKLPFARDRPLECFLWTVGLLPERKYSTKRIEVAKTISILLVIDDIFDTYGSYDDLVLFTKAIQRWDMQEIEQLPEYMKICYMALCNTTNEICYEILKEHGLNVLPFLRKTWIEMVEAFMVEAEWVKRGTEPNLKDYIENGVKTAGTYMALVHLFFLIGEGVTPENMRTLTDSYPSFFSISGTILRLWDDLGTSKEEQERGDVASSIQLLMKEKNITCEEEGRKYILQFIDSSWKELNKTLVVPNTLPISIIRIALNMARASQVVYQHEESSYFSRVDNHVKSLFFAPIQI

SEQ ID NO: 208 - protein, 533 aa, Parasponia andersonii
MSMQSSKPETQHHDSLLKSLLLQHGVVTDHDDSSSTKSTSEEHFVKVQKALRKPSTQRTKMRLIDSIQRLGVGHHFEEIKQILEGFSDLNSSEDNLFDTALRFRLLRHNGLPTSSDVFDQFINKEGEFKESLSQDTCGMLSLYEASYLGAKGEDKLHKAMEFTRSHLKQSMSSVSPELQTQVAKALELPRHLRMATLEARNYIDEYSQESNHNSALLALAKLEFNELQSLHKRELTEIIRWWKQLGLVDKLGFGRDRPCECFLWTVGILPEASYSSIRVELAKTISILLVIDDIYDTYGSLDELVLFNEAIRRWELGAMDMLLEYMKICYMALYNTTNEIGYRVLKEHGWCITEHLKRTWIDIFEAFLTEAEWFNKKHTPTLEPYLTNGVTSGGSYMALVHSFFLIGHDLTDETISLMQPYPELFSCSGKILRLWDDLGTAKEEQERGDVASSIECYMREKNIEFEDEARKHIRELIRSLWMELNGELRASSALPRSITKACIDLARTAQVIYDQSFFNVEDHVQSLFFRPYN

SEQ ID NO: 209 - protein, 545 aa, Trema orientalis
MCQTGSPLSMQSSKPETQHHDSLLKSLLLQHGVVADHHDSSNTKSTSEELFVKVQKVLRKPSTQRTKMRLIDSIQRLGVGHHFEEEIKQILEGFSDLNSSEDNLFDTALRFRLLRHNGLPTSSGVFDQFINKEGEFKESLNQDTCGMLSLYEASYLGAKGEDKLHKAMEFTRSHLKQSMSSVSPELQTQVTKALELPRHLRMATLEARNYIDEYSQESNHNSALLALAKLEFNELQSLHKRELAEIIRWWKQLGLVDKLGFARDRPFECFLWTVGIFPEASYSSIRVELAKTISILLVVDDIYDTYGSLDELVLFNEAIRRWELGAMDKLPEYMKICYMALYNTTNEIGYRVLKEHGWCITEHLKRTWIDIFEAFLTEAEWFNKKHTPTLEPYLTNGVTSGGSYMALVHSFFLIGHDLTDENISLMRPYPELFSCSGKILRLWDDLGTAKEEQERGDVASSIECYMREKNIELEDEARKHIRGLIRSLWMELNGELRAPSALPRSITKACFDLARTAQVIYQHGDDQSFFNVEDHVQSLFFRPCN

SEQ ID NO: 210 - protein, 535 aa, Unknown
  geraniol synthase
MASAVPLSSTPLINGDNSPLKNTHQHVEERSSKRREYLLEETARKLQRNDTESVEKLKLIDNIQRLGIGYYFEDAIDAVLRSPFSAEEEEDLFTAALRFRLLRHNGIQVTPEIFLKFKDERGEFDESDTLGLLSLYEASNLGVTGEEILEEAMEFAEPRLRRSLSELAAPLRSEVAQALDVPRHLRMARLEARRFIEQYGKQSDHDGDLLELAILDYNQVQAQHQSELTEITRWWKQLGLVEKLGFGRDRALECFMWTMGILPHPKYSSSRIESAKAAALLYVIDDIFDTYGKMDELILFTDAIRRWDLEAMEGLPEYMKICYMALYNTTNEICYRVLKDTGRIALPYLKSVWIETIEAYMVEVKWFSGGSAPKLEEYIENGASTVGAYMVLVHLFFLIGEGLTHQNVLFFKQKPYHKPFSAAGRIFRLWDDLGTSQEEEERGDMASSIRLFMKEYKLSTVEEARSCVLEEISRLWKDLNEGLISIKDALPLTIVKVALNIARTSQVVYKHEQHTYMLSVDNYVEALFFTPLLSS

SEQ ID NO: 211 - protein, 505 aa, Unknown; identical to SEQ ID NO: 142
  geraniol synthase

SEQ ID NO: 212 - protein, 529 aa, Ricinus communis; identical to SEQ ID NO: 190

SEQ ID NO: 213 - protein, 537 aa, Medicago truncatula
MLQKSSSRIMHSKLSIKSIALNEKLSPLQTEDKTKSLGQVKRRSREALVNSNDPIVTLKMIDSIQRLGIGHHLEDEINIQLGRICDWDLSQDLFATSLQFRLLRHNGWTTCSDVFRKFLDKSGNFNESLTKDVWGMLSLYEASYLGTEDEEILKKAMEFSRARLSELIPHLSPEVGRNIAKSLTLPKHLRMARLEARNYMEEYSKGSNQIPALLELAKLDSDMVQSLHQRELAEICRWWKELGLVEKLGFARDRPTECFLWTVGIFPEPCHSNCRIELTKTICILLVMDDIFDTYGTLDELVLFTKAIKRWDLDAMDQLPEYMKICYMALYNTTNEIAYKIQKEHGLTVVSYLKRTWIDIFEAFLEEAKWFNNGCVPNFKTYLDNGVISAGSCMALVHATFLIGDGLSKETMSIMMKSYPRLFTCSGEILRLWDDLGTSTEEQERGDNASSIQCMMRENNISDENEGRIHIRMLLGNLWRELNGLATTKTIPLSVVKASLNMARTAQVIYQHGDDQSTFTVDDYVQTLIFTSLPTSH

SEQ ID NO: 214 - protein, 544 aa, Cicer arietinum
MSSTYRSRFLSLQKSKLGTMHCKFSIKSSALNDKVVPLQSDDRSKSLEQVIRKSREVLLKSNDPIATLKMIDSIQGLGISHHFEDEINIQLGRICNWDASQDIFATSLQFRLLRHYGYPTTSDIFRKFLDKSGNFKESFTKDIWGMLSLYEASYLGTEDEEVLKKAMEFSKTHLNELIPNLAPEVGSHIARALTIPKHLRMVRLEARNYMEEYRQATDQIPAFLELAKLDSQIIQSLHQRELEEILRWWKELGLVDRLGFARDRPKECFLWTVGIFPEPYYTNCRIEITKTICILDIIDDIFDTYGTLHDLVLFTKAIKRWDLNAMEQLPEYMKICYMALYNTTNEIAYRIQKEQGLTVVSYLKRTWIDMFDAYLEEAKWFNSRYVPSFKTYLDNGVISSGSCMVLVHATFLIGDDLSKETISMMNSYPRLFSCTGEILRLWDDLGTSKDEQERGDNACSIQCLMKENNILDENVARKNIRLLIGKLWRELNGLAMTKTVPLSIVKASLNMARTSQVIYQYGDDKSTFTVDECVQTLIFTSLPR

SEQ ID NO: 215 - protein, 531 aa, Glycine max
MAFSEKVPSQTYYPGMKDFDQVKRKSQEALLNSSDSLRTLEIIDTIQRLGIEHHFEKEINLQLGRIGDWNAAEDLFATSLQFRLLRHYGWPTCSDVFNKFLDQSGNFKESVTRDIWGMLSLYEASYLGAKGEEVLQQAMDYSRAHLCQSLSDLSPKVGSIVVEALKLPRHLRMGRLEAKNFMVEYSQASNQIPALLELARLDYDMIQSMHQKELAEISRWWKELGLIERLGFGRDGPRECFLWVLGIFPEPRYSNCRIELAKAICILQVLDDMFDTYGTLDELILFTKAIKRWDLDVMEQLPEYMKICYMALYNTTHEIAYKIQKDHGQTVVACLKRTWIDLIEAYLKEAKWFNNKYVPTFQQYLDNGVISSGSYLALVHASFLIGDDFSKETISMMNPPYPRLFSCSGEILRLWDDLGTSRDEQERGDNACSIQCLMTENNISDENVARRHIRKLIKNLWPELNGLSMTTTTTTLPLSVMRASLNMARTSQVIYQHGDYQSMLTVDDHVQALLFTPSINYQDESDINHVI

SEQ ID NO: 216 - protein, 528 aa, Glycine max
MSVAFSDKVPSQTYLGTKDLDQVIRKGQEALLNSSDPLRTLKIIDTIQKLGIEHHFEKEINLQLGRVGDWDTAEDLFATALQFRLLRHNGWPTCSDVFNKFLDKSGNFKESVTRDIWGMLSLYEASYLGAKGEEVLQQAMDYSRAHLCQSLPHLSPKVRSIVAEALKLPRHQRMVGLEAKNYMVEYSQASNQIPALLELARLDYDMIQSMHQKELAEISRWWKDLGLIERLGFGRDGPRECFLWALGIFPEPRHSSCRIELAKAICVLQVIDDVFDTYGTLDELVLFTKAIKRWDLDAMEQLPEYMKICYMALYNTTHEIAYKIQKDHSLTVVACLKITWIDLIEAYLKEANWFNNKHVPTFQQYLDNGVISSGSYLALVHATFLIGDDLSKETIFMMNPYPRLFSCSGKILRLWDDLGTSRDEQERGDNACSIQCLMKQNNISDENVARKLIRQLIDNLWPELNGLTMTTNLPLSVMRASLNMARTSQVIYRHGDDQNMPTVDEHVQTLLFTPSINYRDENDINHVI

SEQ ID NO: 217 - protein, 519 aa, Phaseolus vulgaris
MSQTNSTITSLEQLKIRSQKVLLNSSDSLRTLELIDTIQRLGIEHHFEEEINLQLGRVGDCNNAKDLFATSLQFRLLRHNGWSTSSDVFNNFLDKSGNFKESVTRDIWGMLSLYEASYFGAQGEEVLQHAMEFSMAHLHQSLPLLSPYVGKVIVEALKHPRHQRMSRLEARNYMVKYSKESNQILALLEFARLEYDTVQSMHQKELAEISRWWKNLGLIERLGFGRDGPRECFLWMLGIFPEPCYSNCRIELAKAICILQVLDDMFDTYGTLDELILFTEAIQRWDLDAMGKLPEYMKICYMALYNTTHEIAYNIQKDHGQTVVACLKKTWIDLLEAYLIEAKWFNKKYVPAFGEYLDNGVISSGSCLALVHATFLIGDNLSKETISMMSPYPRLFSCSGEILRLWDDLGTSKEEQKRGDNACSIQCLMKENDISDETFARKHIRQVLGNLWSELNSLVMATTTLPFTIRKASLNMARTSQFIYQHGDDQTMPTVNDLVKLLIFTPSKSGEESNTNCVV

SEQ ID NO: 218 - protein, 524 aa, Phaseolus vulgaris
MQKMPSQTNPMTTSLEQLKIKSQEVLLNSSDSLRTLKLIDTIQRLGIEHHFEEEINLQLGKVKDCNNAKDIFATALQFRLLRQNGWSTSSDVFNKFLDKSGNFKESVTRDIWGMLSLYEASYFGAQGEEVLQRAMEFSMAHLHQSLPLLSPEVGRVVVEALKLPRHQRMSRLEAKNYMVQYNKESSQIPALLQFARLEYDTLQLIHQNELVEISRWWKNLGLIERLGFGRDGPRECFLWMLGVFPEPCYSNCRIELAKAICILQVLDDMFDTYGTLDELILFTEAVQRWDLDAMEKLPEYMKICYMALYNITHEIAYKIQKDHGQTVVACLKKTWIDLLEAYLIEAKWFNNKYVPTFGEYLDNGVISSGSCLALVHATFLIGDNLSKETISMMSPYPRLFSCSGEILRLWDDLGTSKEEQKRGDNACSIQCLMKENDISDETFARKHIRQVIGNLWSELNSLVIATTTLPFTIRKASLNMARTSQFIYQHGDDQTMPTVNDLVNVLLFTPSSKSREESDTNFVV

SEQ ID NO: 219 - protein, 533 aa, Phaseolus vulgaris
MCKTSTPTIMQLSINSLPLTQKVPSLIDLGTKRMEQVKRRSQETLLNSSDPIKTLKIIDTIQRLGIGHHFEEEINVKLGKLRDWDFSEDLFSTTLQFRLLRNNGWPTSSDVFKKFLDKSGNFKESITNDIWGMLSMYEASYLGAKGEEVLEKAMDFSTAHLHQSLQHLSPDVGNLVARALTLPRHLRMSRLEARNYIKEYSQVSSHMPYLLEMAKIDYAMLQSMHQKEFAEISRWWNKLGLAERLGFARDKPAECFLWTMGIFPEPCYSNCRIELTKTICILLVMDDIFDTYGTLDELILFTKAIKRWDLDAMEQLPEYMKISYLALYNTTHEIAYKIQMEHGQNVISSLKRTWIDIFEAFLKEAKWFNNKYVPTFQEYLDNGVISSGSYMALVHATFLIGDGLSKETISMMNPYPRLFSCSGEILRLWDDLGTSKEEQERGDNACSIQCLMIENNISDENVARKHIRRFIRNLWPELNSLVLTTTSLPFSIMKASLNMARTAQVIYQHGDDRNTFTVDDYVQTLLFTPSANY

SEQ ID NO: 220 - protein, 570 aa, Morus notabilis
MEAYSPKKKLNFARHSDSLSCKCQSQLSPTTQPSTLEISHNETLLKSLVLHQEVVSNQAYHHEHDPSSVSSTSDELIAKIKKALREPSSQRAKMKLVDVIQRLGVGHHFEKEIRLLLEGFLDYNSNEGLYDAALRFRLLRHNGLPTSSDVFDKFMNNKGDFKESLRQDIWGMLSLYEASYLGAKGEDKLLKAMEFTRSHLKQSLPSLPPQLQTQIAKSLELPRHLRMATLEARNYIDEYSQESNHSLALLELAELEFSELQSLHRKELAEIIIWWKQLGLVEKLGFARDRPFECFLWTVGVFPEASYSNIRIELAKTVCILLVLDDIYDTYGSLDELILFNDAIKRWELSAMEQLPAYMKICYMALYNTTNEIAYRVLKEHGWCISAHLKRTWIDIFEAFLTEAEWCNRRYTPTLEQYLTNGVTSGGSYMALVHSFFLIGHDVTDETVSMMEPYPELFSCSGKILRLWDDLGTAKEEQERGDVASSMECYMKENNVELEDEARKHIKKMIGNLWMELNEHLMAPSALPRSITKACFNLARTAQIIYQHGDDETFFSVEDHVQSLFFTPCK

SEQ ID NO: 221 - protein, 523 aa, Vitis vinifera
MSEADSSTRRMKEVKERTREAFYRAWDSRAAMEMVDTVERLGLSYHFEDEIKALLQRFCDWNSSEDLFTTSLRFRLLRQNGFPTHSDVFGKFMDKNGKFKESLTEDIWGMLSLHEASHLGAKNEEVLAEAKEFTRIHLIQSMPHMEPHFSSHVGRALELPRHLRMARLEVRNYIGEYSRESNPNLALLELAKLDFDMVQSLHQKELAEIVRWWKQLGLVDKLDFARDRPMECFLWTVGIFPDPRHSSCRIELTKAIAILLVIDDIYDSYGSLDELALFTDAVKRWDLGAMDQLPEYMKICYMALYNTTNDIAYRILKEHRWSVIEDLKRTWMDIFGAFLAEAHCFKGGHVPSLEEYLNNAVTTGGTYMALVHAFFLMGQGVTRENMAMLKPYPNIFSCSGKILRLWDDLGTAREEQERGDNASSIECYKREREREMDTVLDDEACRKHIRQMIQSLWVELNGELVASSALPLSIIKAAFNLSRTAQVIYQHGDDNKTSSVEDHVQALLFRPVSSNGHAQITMH

SEQ ID NO: 222 - protein, 553 aa, Sesamum indicum
MCMSSSSSSSMPMSVPTAAPMITANGALLKYIRQPTLFPVEQDEGSKRRDYLLGKVGMQLQSAAAAVEKLKLIDTIQRLGIAYYLEDGINAILQAEFSNALSTDDDLFTTALRFRLLRHNGFQISPDVFLKFMDKNGQFKESLTDDKLGLLSLYEASYLGSNGEEILEKAMELTKTHLQRSLPQLPPQLQGQVAQALELPRHLRMARLEARRYIDQYAAQSDCDQELLELAILDYNKVQAQHQMELAEITRWWTQLGLVDKLTFARDRPLECFLWSVGLLPEPKYSTCRIELAKTIAILLVIDDIFDTYGKMDELLLFTDAIRRWDLEAMETLPEYMKICYMALYNTTNEICYKVLKENGWSVLPYLKSTWIDMIEGFMVEAKWFNGGSAPNLEEYIENGVSTAGAYMALVHLFFLIGEGVTDHNARLLFKPYPKLFSAAGRILRLWDDLGTAKEEEERGDLASSIHLLMREKKLATEEEGRSRILEDIYGLWKDLNGELIAKNGMPLAIIKVALNMARASQVVYKHDEDTYFSSVDNYVEALFFTPLSFTYN

SEQ ID NO: 223 - protein, 529 aa, Jatropha curcas
MCQSQTQYRTTARCQLSVIPQYPAPELLLANRCPKSLEELQEATRKELLTTGNPTASMKLIDSIQRLGIGYHFEEEISMLLERILEWNINGHDLLTSALRFRLLRHNGLPVYSDVFRKFMNKNGKFKESLSKDTMGLLSLHEASYLGSKDEAELVHAMEFTRNYLQGYIAQNKKIGQALELPRHLRMTRLEARNYIDEYSLQTNHSQTLFQLAKLDYNAVQSLHQKELVEIVRWWKELGLVEKLGFARDRPLECYLWTVGIFPQPYDSNSRIQLTKTVAILLVIDDIFDTYGSFSDLILFTDAVRRWDLSAIESLPEYMKICYMALYNTTNDIAYMVLKQNGWSIVPHLKRTWIDMFEAFLTEAKWFKNGYVPTLEEYLVNGVTTGGTYMALVHSFFLLGQGVTKETITMLEPYPDLFTSAGKILRLWDDLGTSREEQERGDVASSIECFMKEKAISCEGEGRKEVRQLIRNLWVELNGELIAPSRMPLSTINASFNLARTAQIVYQHGDDMKGLSVDDQVQALLYQPI

SEQ ID NO: 224 - protein, 558 aa, Erythranthe guttata
MGSNYRARNLCICMSLLSPLTITGNYDNALLKYIRQPMVLIPTQEDEGTKRREYLLERTARELQESTTVEKLKLIDTIQRLGIGYYFEEDINAILLVEFSNALITEDNLFTTALRFRLLRHNGFQITSDVFLKFMDENRKFEESLADDTLGLLSLYEASYMGANGEEILEEATKFTKAYLQLSIRQLSPPHHHDQLVIEALKLPRHMRMARLETRQYIEKYGAQSDCDAALLELATLDYNKVQTQHQIELAEITRWWRQLGLVKKLTFARDRPLECFLWTVGLLPEPKYSTCRIELAKTIAILLVIDDIFDTYGKMDELVIFTDAIRRWDLEAIETLPKYMKICYLALYNTTNEICYNVLKENGWTVLPYLKSTWIDMIEGFMVEATWFNGGSEPNLEEYIENGVSTAGAYMAFVHLFFLIGEGVTRENSELLLNKPYPNIFSFAGRILRLWDDLGTSKEEEERGDMASSIRLFMREKNIEREEEGRKRVLEEIYGLWKDLNGEMMCENRVMPLAIIDVALNMARASQVVYNHEEDSYFSNVDNYVEALFFTPIASYL

SEQ ID NO: 225 - protein, 515 aa, Vigna radiata
MTMTSFEQLKIKSQEVLLDSSDSLRTLKLIDTIQRLGIDHHFEEEINLQLGRLGDCNNAQDLFATALQFRLLRHNGCSTSSDVFNKFLDKSGNFKESATRDVWGMLSLHEASYLGAKGEEVLQHAMECSRAHLHQSLPHLSPEVGRVVVEALKYPRHQRMARLEAKNYMVQYSKESNQIPALLELARLDYDMVQSMHQKELAEISRWWKDLGLIERLGFGRDGPRECFLWSLGVFPEPRHSNCRIELAKAICILQVIDDMFDTYGTLDELILFTEAVQRWDLDAMEKLPEYMKICYMALYNTTHDIAYRIQRDHGQTVVASLKRTWIDLLEAYLKEAKWFNNKYVPTFKEYLDNGVISSGSCLALVHATVLIGENLSRETISLMSPYPRLFTCSGEILRLWDDLGTSKEEQERGDNACSIQCIMKENDILDESFARKRIRQLLGNLWPELNGLAMANTTLPSAVTKASFNMARTSQFIYQHGDDQQMPTVDDLVQALLFTSSEKYREETDINFVV

SEQ ID NO: 226 - protein, 519 aa, Vigna radiata
MSVAFRDKVPIQIDPGKKKLEQVKRSSQETLLNSSDPTKTLKIIDIIQRLGIGHHFEEEINVNLGKVRDFDFSQDLCSTALQFRLLRHNGCHASSDVFKKFLDHSGNFKESITSDIWGMLSMYEASYLGAKGEEVLQQAMDFSSAHLQQSLPLLSPDVGNHVVRALTLPRHLRMSRLEARNYIEEYSHVSSKMPCLLEMAKIDNAMVQSMHQKELADISRWWKDLGLVESLGFARDKPGECFLWTVGVFPEPCYSNCRVELAKTICILLVMDDIFDTYGTLDELVLFTEAIKRWDLDAMEQLPEYMKISYLALYNTTQEIACRIQMEHGQTVLSCLKRTWMDIFEAFLKEAKWFSNKYVPTFQEYLANGVISSGSYMALVHATFLIGDGISKETISMMNPYPRLFSCSGEILRLWDDLGTSREEQERGDNACSLQCLMTENNISDENVARKEIRGFIRNLWPELNSLALTTTSLPFSVIKASLNMARTSQVIYQNGDDQNTFTVDDYVQTLLFTPAQNS

SEQ ID NO: 227 - protein, 517 aa, Arachis duranensis
MLREKVECLESNDRKKSLEQVKKEGQEALLKKSSDPVGTMKIIDSIQELGIGHHFEEEINALLGKICHWDASQDLFATSLQFRLLRHNGWTTFPENFNKFLDKSGNFKESLSRDIGGVLSLYEASFLGAEGEGVLQQAMDFSRGHLHQSIPHMAPELGRQVSRALRLPRHLQMERLEAKNYMDQYSRTTTKIPALLELAKLDYDMLQSLYKRELGEITRWWKELGLIESLGFARDRPSECFLWTVGIFPEPRYSNCRIELTKTVCILLVMDDIFDTYGSFDDLVLFVKAIKRWDLDAMEQLPEYMKICYMALYNTTHEIAYKIQKERGLTAVAYLKKTWIDIFEAFLEEAKWFNQGYVPSFREYLDNGVISAGSYMAMTHATFLVGDGISKDTLSLMKTYPRLFSCSGEILRFWDDLGTSTEEQERGDNACSIQCYMRENNGCDENEARKHIRGLIGKLWLELNGVAMNTTALPSSIVKACFNMARTAQVIYQHGDDKSTYTVDDYVQTLFFTPSAI

SEQ ID NO: 228 - protein, 529 aa, Vigna angularis
MAMKQNKLSIKSVAFRDKVPIQIDPGKKKLEQVKRSSQETLLNSSDPTKTLKIIDNIQRLGIGHHFEEEINVKLGKVADCDFSQDLCSTALQFRLLRHNGCHASSDVFKKFLDHSGNFKESITTDIWGMLSMYEASYLGAKGEEVLQQAMDFSSAHLQQSLPLLSPDVGNHVVRALTLPRHLRMSRLEARNYIEEYSQVSSKMPYLLEMAKIDNAMVQSMHQKELADISRWWKDLGLVERLGFARDKPAECFLWTVGVFPEPCYSNCRIELAKTICILLVMDDIFDTYGTSDELVLFTEAIKRWDLDAMEQLPEYMKISYLALYNTIQEIACRIQMEHGQTVLSCLKRTWIDIFEAFLKEAKWFSNKYVPTFEEYLANGVISSGSYMALVHATFLIGDGISKETISLMNPYPRLFSCSGEILRLWDDLGTSREEQERGDNACSLQCLMTENNISDEIVARKQIRGFIRNLWPELNSLALTTASLPFSVIKASLNMARTSQVIYQNGDDQNTFTVDDYVQTLLFTPALEY

SEQ ID NO: 229 - protein, 426 aa, Vigna angularis
MTQTIPTMTSLEQLKIKSQEVLLDSSDSLRTLKLIDTIQRLGIDHHFEEEINLQLGRVADCNNAQDLFATALQFRLLRHNGWSTSSDVFNKFLDKSGNFKESVTGDVWGMLSLHEASYLGAEGEEVLQHAMECSRAHLHQSLPHLSPEVGRVVVEALKLPRHQRMVRLEAKNYMVQYSKESSQIPALLELARLDYDMVQSMHQKELAEISRWWKDLGLIERLGFGRDGPRECFLWALGVFPEPRHSNCRIELAKAICILQVIDDMFDTYGTLDELILFTEAVQRWDLDAMEKLPEYMKICYMALYNTTHEIAYRIQRDHGQTVVASLKRTWIDLLEAYLKEAKWFNDKYVPAFEEYLDNGVISSGSCLALVHATVLIGENLSRETISLMSPYPRLFTCSGEILRLWDDLGTSKEEQERGDNACSIQ

SEQ ID NO: 230 - protein, 505 aa, Lupinus angustifolius
MCSTKSLEQVKRKIQETLLNSDRLGTLKIIDSIQHLGIGHHFEEEINALLGRVLDYDTAHDLFATSLHFRLLRHNGFPTSSDIFKKFCDKSGYFKESLSKDIWGMLSLYEASYLGAEGEELLHKAMDFSKVHLHNSISQLGPQVSMHIARSLILPRHLKMAKLEAKNYIHEYSHASNQIPALLELAKLDYDMAQSLHQRELAEICRWWKELGLVGRLGFGRDRPAECFLWTLGIFPEPSYSNCRIELTKTICILLVMDDIFDTYGSLDDLILFTDAIRRWDPDAMVQLPEYMKICYMALYNTTHEIAFRIQKEHGVTVVAHLKRTWIDIFEAFLEEAKWFNKGYMPTFREYLNNGVISAGSYMAMVHATFLIGDGNSKENISMMKPYPRLFSCSGEILRLWDDLGTSTEEQERGDNACSIQCHMRENNISDENEARKHIREFIGKLWQELNGIAMNTNLPWSIVKASLNMARTAQVIYQHGDDKSTYSVDEYVQTLLFTPSPRNS

SEQ ID NO: 231 - protein, 495 aa, Cajanus cajan
MSSQEALLNTSDSLRTLKTIDTIQRLGIEHHFKEEINLQLGRLTNWEPVENLFATALQFRLLRHNGWPTRSDVFNKFLDKSGNFKESVTKDIWGMLSLYESSYLGTKDEEVLQQAMDFSRAHLHRSLPYLSLEVKNIVGGALMLPRHLRMARLEAKNYMVECRKTSSQIPDLLKLARLDFDISQSMHQKELAEISRWWKNLGLVESIGFGRDKPGECFLWVLGILPEPCYSNCRIELAKAISVLQVMDDMFDTHGKLDELVPFTMAIRRWDLDAMEQLPEYMKICYMALYNTIHEIAYRIQKEHGKTVITCIKRTWIDIFEAYLKEAKWFNNKYVPTFREYLDNGVISSASFMALVHSTLLIGDNLSEKTISMMIPYPRIFSCSGEILRLWDDLGTSRDEQKRGDNACSIQCLMAENNISDENVARKHIRKLIGNLWLELNGLALTTTDFPLSVARTSLNMARAAQAIYQHGDDQSSLTVDDQVQALLFTPSANY

SEQ ID NO: 232 - protein, 543 aa, Cajanus cajan
MSSMFQPRNLSLKTSRPPMIYNNLSIKSIAFRDKVLLFQTDPSTRNLEQVKRRSQELLLNSRDPIKTLKIIDNIQRLGIGHHFEEEINVQLGRVGDWDVTQDLLATALQFRLLRHNGWPARSDAFKKFLDNTGNFQESITNDIRAMLSLYEASYLGAKGEEILQQAMDFSTAHLHQSLPHLSPELGRIVARSLTLPRHLRMARLEAKNYMEEYSQASSQIPSLLELAKLDHVMVQMMHQKELAEISGWWKKLGLVERLGFARDRPEECFLWTVGVFPEPYYSTCRIELTKTICILLVMDDIFDTYGTLDELILFTKAIKRWDLDAMEQLPEYMKICYIALYNTTHEIANKIEKAHGESVVACLKRTWTDIFEAFLKEAKWFNNKYIPTFREYLDNGVISSGSYMAMVHATFLVGDGLSKETISMMKPYPRLFSCSGEILRLWDDLGTSREEQERGDNACSIQCFMTENNISDENVARKHIRELIRNLWPELNGLAMTTSALPLSVMKASLNMARTAQVIYQHGDEQNAFTVDDYVKTLLFTQH

SEQ ID NO: 233 - protein, 503 aa, Manihot esculenta
MANPTASLKLIDSIQRLGLGYHFEEEISMLLERFVDWNPDDQDLLATALRFRLLRHNGFPASSDVFSEFKGRDGKFKQSLSKDPLGLLSLYEASYLGTKEEEELVQAMEFTRTHLQKRSFSLLPSQHRRQVVQALEVPRHLRMSRLEARNYIDEYSRESNHSPDLLDLAKLDFNAVQQLHQKELVEIIRWWKQLGLVEKLGFARDRPLECYLWTVGIFPEPYNSNCRIELTKTIAILLVIDDIFDTYGSLPDLVLFTEATRRWDLSAMESLPEYMKICYMALYNTTNDIAYMVLKQHGWSIVPHLKRTWIDMFEAFLAEAKWFNKEYVPSLEEYLVNGVTTGGTYMALVHSFFLMGQGVNKQTLALMEPYPDLFTFSGKILRLWDDLGTAREEQERGDVASSIECFMRESRISGEDEARKQIRELIRSLWIELNGELVAPSSMPLCIVNASFNLARTAQVVYQHGDDKKGSSVDDQVQALIYKPIPLDDEAKVVHDLETMVVI

SEQ ID NO: 234 - protein, 504 aa, Hevea brasiliensis
MERTRKELLTPANPSASLKFIDSIQRLGIGYHFEEEINMLLERCVDWNAGQDLLATALRFRLLRHNGFPACSDVFNKFKDKDGKFNQSLSKDPLGLLSLYEASYLGTEEEVELVQAMEFTRTHLQKISIPLFSPQDRCQVFQALEIPRHLRMSRLETRNYINEYSMESNRKPTLLDLAKLDFNAVQLVHQKELVEIIRWWKQLGLVEKLGFARDRPLECYLWTLGIFPEPYNSNCRIELTKTIAILLVIDDIFDTYGLLPDLVLFTEAIRRWDLSAMEPLPEYMKICYMALYNTTNDIAYMVLKQHGWSIVPHLKRTWIDMFEAFLAEAKWFNNEYVPSLEEYLVNGVTTGGTYMALVHAFFLMGQGVTKQTVAMMEPYPDLFSFAGKILRLWDDLGTAREEQERGDVASSIQCFMREKGISCEDEGRKQVRQLIRSLWIDLNGELVAPSSMPLSIINASFNLARTAQVVYQHGDDKKGSSVDDQVQALIYKPISLGDMKQDCV

SEQ ID NO: 235 - protein, 533 aa, Helianthus annuus
MATIAISTTQGNDFLLVKPQLVISSEGDVRKRIHNLKENTRRALMTASNPAMKLKLVDMIQRLGLGYIFEEDIKIMLETLAHGQPDDDLYTVALRFRILRHNGLHPNPDVFGAFMDANGKFGESLVEDTEGLLSLYEASYLGANGEDILSQAKEFTTTHLKKSVSRFTHKLGEQILESFEIPRHLRMVRLEARRYIEEYGKDIDHTPVFLQLAKLEYNQVQSLHQMELAELSRWWRDLGLASKLTFARDRPIECFLWSVGLLPEPKYSTVRIELAKTVSILLVIDDVFDTYGTYDDLVLFTKAIQRWDVDEIEQLPEYMKICYMALHNTTNEICDVVHKNHGLSVLPYLRKAWIDTIQAFMVEAEWVKRGYEPDLKDYIDNGITTAGTYMALVHLFFLMGEGVTPKNMSSLLHSYPPFFTHAGKILRLWDDLGTSKEEQERGDIASSVQLLMKEKNIKSEEDGRKQILELIQTSWKELNEALVAPNIFPFSIVNVALNMSRASQVVYQHDDGNSYFSSVDDHARSLFFTPIDM

SEQ ID NO: 236 - protein, 526 aa, Olea europaea
MAENGAMYNYIRQPVIVTPEVDDGTKHSELVERTRRELQRSTKPVETLKLIDNLQRLGIAYYFEDDINAILDQFSDGLPDEDLFTTALCFRLLRDSGYKTGSDVFLKFMEKNMKFKDHLAQDTIGLLSLYEASSMGANGEEILSEAKEFTEIHLRQSMPRLVPQLRRQVSSALELPRHLRMARLEARRYIEEYGNESDHDPAVLELARLDYNKVQLQHQMELAEITRWWKQLGLVEKLSFARDRPLECFLWTVGLLPEPKYSSCRIELAKTIAILLVIDDIFDTYGKMEELVLFTEAIQRWDLDELETLPPYMRICYMALYNTTNEICYKILKEYGFCVLPYLKSTWIDMIEGFMVEANWFNGGHGPNLEEYIENGVSTAGAYMALVHLFFLIGEGVTNENIAKLLRKPYPKLFSAAGRILRLWDDLGTAKEEEERGDLASCMQILMREKNIDCENEGRNYILKAINGLWKDLNDELISPNAMPLAITKVALNMARASEVVYKHEEDSYFSSVDNYVQALFFTPIN

SEQ ID NO: 237 - protein, 508 aa, Lactuca sativa
MSEVHGSNRVTELKEKIRALMTDSNPIILMELVDKIQRLGLGCTFEEDINKIMKYLVQGHPNDDLYTVSLRFRLLRHNGLHVNPDVFGSFMDANGKFKESLSEDIEALLSLYEASYMGADGEDILSEAREFTTRHLKKSVFKLTPLLRNKVLQSLKLPRHLRMERLEARMYIEEYGNEQDHIPILLELAKLEYNEIQILHQMEISEITRWWKHLGLTDKLPFARDRPLECFLWTVGLLPERKYSTKRIEVAKTISILLVIDDIFDTYGSYDDLVLFTKAIQRWDMQEIEQLPEYMKICYMALCNTTNEICYEILKEHGLNVLPFLRKTWIEMVEAFMVEAEWVKRGTEPNLKDYIENGVKTAGTYMALVHLFFLIGEGVTPENMRTLTDSYPSFFSISGTILRLWDDLGTSKEEQERGDVASSIQLLMKEKNITCEEEGRKYILQFIDSSWKELNKTLVVPNTLPISIIRIALNMARASQVVYQHEESSYFSRVDNHVKSLFFAPIQI

SEQ ID NO: 238 - protein, 517 aa, Citrus clementina
MQNVLTYEGDRGTKSLEEELQERTRKALRKSSNDPTATMKLIDTIQRLGIGYHFEDEIMERLERFSDGDAAGEENLFENALRFRLLRHNGLPACTDIFKKFINKEGKLKESVSKDTRGMLSLYEASYLATQDKDILFEAMEFTKTELTQSVSLMDSQSSRHVVQALALPRHLRMSRSEAGNYINEYSQSWNHDQTLLQLAKSDFNMVQSLHQRELAEIKRWWKQLGLVDKLGFGRDRPLECFLWTVGIFPEPYYSNCRIELAKTIALLLVIDDIFDTYGSLSDLVLFTEAIQRWDLGAMEHIPEYMKICYMALYNTTNEISYRILKDHGWNVVPQLKRTWIDIFEAQLSEAKWFSEGYVPTQEQYLRNGVTTGGTYMALVHAFCLMGQDVTKETLAMMEPYPNLFSCSGKILRLWDDLGTAREEQERGDVASSIECYMREKTISCEEEARKHIRQLIRSLWVELNGMLVAPAALPASIVNASLNLARTAQVVYQHGDDNTVTSVNGHIERLFCNPLT

SEQ ID NO: 239 - protein, 565 aa, Medicago truncatula
MVVTELRVSCLTSALSCCNSRSSTYHSRILLLQKSKPGFMHRKLSINSTALNDKVAPLQTDDSTKSLEQVKRKSQEALLNSSDPMVALKMIDSIQGLGIGHHLEDEINIQLGRICDWDLSLDLFGTSLQFRLLRHNGWPTCSDVFKKYLDKSGNFKESLTKDIWGMLSLYEASHLGTEDEEILKRAMKFSSAHLNELIPHLSPEIGRNIAKSLTLPKHLRMARLEARNYMEEYSKGSNQIPALLELAKLDSDMVQSLHQRELTEICRWSKELGLIERLSFARDRPTECFLWTVGIFPEPCYSNCRIELTKTICILDVIDDIFDNYGTLEDLVLFTKAIKRWDLDGMEQLPEYMKICYMALYNTTNEIAYRIQKEHGLTVVSCLKKTWMDMFDAYLEEAKWFNSGYVPSFKTYLDNGVISVGSCMALVHSTFLIGDGLSKETISMMKQYPRLFSCSGEILRLWDDLGTSTEEQERGDNACSIQCLMKENNISDENEARKHLRLLIGNLWRELNGLAMSKTIPLSVVKASLNMARTAQVIYQHGDDQSTFTVDDYVQTLIFTSFPNS

SEQ ID NO: 240 - protein, 580 aa, Cicer arietinum
MAVINELRISYLTNSIARSYSRISIYQSQILSLQKSKSEIMHSKFTIKSVALNHKVVPLQSDDRSKSLEQVIRRSREVLLNSSDPILTLKMIDSIQGLGISHHFEDEINIQLGRICNWDTSQDIFATSLQFRLLRHNGYPTTSDVFRKFLDKSGNFKESFTKDIWGMLSLYEASHLGTEDEEVLKKAMEFSKTHLNELIPNLAPEVGSHIARALTIPKHLRMVRLEARNYMEEYRQATDQISVFLELAKLDSQIIQSLHQRELAEISRWWKELGVVDRIGFGRDRPTECFLWTVGIFPEPYYTNCRIELTKTICILLVMDDIFDTYGTFHELVLFTNAIKRWDLDAMEQLPEYMKICYMALYNTTNEIAYRIQKEHGLNVVSHLKRTWIDIFDAFLEEAKWFNSGYVPSFKTYLDNGVISAGSCMALVHATFLIGNHVHGLSKETFSTTKPYPRLFSCSGEILRLWDDLGTSTEEQERGDNASSIQCLMRENNISDENEGRKHIRLLIGKLWRELNGLVMTKTIPFSIVKASLNMARTSQLIYQHGDDKTTFTVDDYVQTLIFTSRGGHGSDRVGFGSKT

SEQ ID NO: 241 - protein, 647 aa, Citrus sinensis
MASALVDDDEDGNQHHQDPKRQYEQCLKKCERREGGVVAVQAAARNRSRKSNEEEKKRECLTPQATGRDQKKSNKGAILTTFTNKDSGPLVSLRTRSWQQGRSLHSNSLSCICQLSSLPKPLVTDFKTSPRQNVLTYEGDRGTKSLEEELQERTRKALRKSSNDPTATMKLIDTIQRLGIGYHFEDEIMERLERFSDGDAAGEENLFENALRFRLLRHNGLPACTDIFKKFINKEGKLKESVSKDTRGMLSLYEASYLATQDKDILFEAMEFTKTELTQSVSLMDSQSSRHVVQALALPRHLRMSRSEAGNYINEYSQSWNHDQTLLQLAKSDFNMVQSLHQRELAEIKRWWKQLGLVDKLGFGRDRPLECFLWTVGIFPEPYYSNCRIELAKTIALLLVIDDIFDTYGSLSDLVLFTEAIQRWDLGAMEHIPEYMKICYMALYNTTNEISYRILKDHGWNVVPQLKRTWIDIFEAQLSEAKWFSEGYVPTQEQYLRNGVTTGGTYMALVHAFCLMGQDVTKETLAMMEPYPNLFSCSGKILRLWDDLGTAREEQERGDVASSIECYMREKTISCEEEARKHIRQLIRSLWVELNGMLVAPAALPASIVNASLNLARTAQVVYQHGDDNTVTSVNGHIERLFCNPLT

SEQ ID NO: 242 - protein, 514 aa, Vigna angularis
MSFVPIQIDPGKKKLEQVKRSSQETLLNSSDPTKTLKIIDNIQRLGIGHHFEEEINVKLGKVADCDFSQDLCSTALQFRLLRHNGCHASSDVFKKFLDHSGNFKESITTDIWGMLSMYEASYLGAKGEEVLQQAMDFSSAHLQQSLPLLSPDVGNHVVRALTLPRHLRMSRLEARNYIEEYSQVSSKMPYLLEMAKIDNAMVQSMHQKELADISRWWKDLGLVERLGFARDKPAECFLWTVGVFPEPCYSNCRIELAKTICILLVMDDIFDTYGTSDELVLFTEAIKRWDLDAMEQLPEYMKISYLALYNTIQEIACRIQMEHGQTVLSCLKRTWIDIFEAFLKEAKWFSNKYVPTFEEYLANGVISSGSYMALVHATFLIGDGISKETISLMNPYPRLFSCSGEILRLWDDLGTSREEQERGDNACSLQCLMTENNISDEIVARKQIRGFIRNLWPELNSLALTTASLPFSVIKASLNMARTSQVIYQNGDDQNTFTVDDYVQTLLFTPALEY

SEQ ID NO: 243 - protein, 619 aa, Helianthus annuus
MPYLMFHTTYYINHIQLKRNKGMASQAYITSIFSHKVLYQRQLIIIPPFKGSKNCRSIFSSAQACPNTITSATEELIDTLSPLSMTDTVSYSGDRNSLILDHYGMMVIPPHDVNNRIEELKEYTRRALMNTSDSTMTLKLIDTIQRLGVGYYYEEEEIRKILKKLTHVLPKDDLYTVALHFRLQRHYGLHTNPAAEVFRNFMDENGELKKSSSEDIEGVLSLYEASCLGSSGEDFLLHHKEITRRYLSRSVSKLSLKLHKNVVEGLKLPRHMRMERLEARRYIEEYGNEDDHNPFVLEFAKYDYNKVQSVFQRELVEVNRWWEHLGLSSKLGFVRDRHVECFLWTVGLLPEPSFSGSRIELAKTIAIMLVIDDIYDTYGSYDDLVLFTEAIKRWDLNAIEQLPEYMKICYQALYNTNNEICDKIKKERCLSVQPFLRKTWIDMAEAYMVEAEWVKRGRIPTLNDYIENGVTTSGTYMALVHLFFLISYGLTTENMKHLLDPYPKFFTMAGTILRLWDDLGTIKEEQERGDMLSSIHLLMKEENITCEEEGREGILQMIYALWNDLNVELLTPDAVLFRMIKVALNMSRTSQVVYQHNDDSYLLSVKDHVQSLFYEPVDI

SEQ ID NO: 244 - protein, 618 aa, Helianthus annuus
MPYLMFHTTYYINHIQLKRNKGMASQAYITSIFSHKVLYQRQLIIIPPFKGSKNCRSIFSSAQACPNTITSATEELIDTLSPLSMTDTVSYSGDRNSLILDHYGMMVIPPHDVNNRIEELKEYTRRALMNTSDSTMTLKLIDTIQRLGVGYYYEEEEIRKILKKLTHVLPKDDLYTVALHFRLQRHYGLHTNPAEVFRNFMDENGELKKSSSEDIEGVLSLYEASCLGSSGEDFLLHHKEITRRYLSRSVSKLSLKLHKNVVEGLKLPRHMRMERLEARRYIEEYGNEDDHNPFVLEFAKYDYNKVQSVFQRELVEVNRWWEHLGLSSKLGFVRDRHVECFLWTVGLLPEPSFSGSRIELAKTIAIMLVIDDIYDTYGSYDDLVLFTEAIKRWDLNAIEQLPEYMKICYQALYNTNNEICDKIKKERCLSVQPFLRKTWIDMAEAYMVEAEWVKRGRIPTLNDYIENGVTTSGTYMALVHLFFLISYGLTTENMKHLLDPYPKFFTMAGTILRLWDDLGTIKEEQERGDMLSSIHLLMKEENITCEEEGREGILQMIYALWNDLNVELLTPDAVLFRMIKVALNMSRTSQVVYQHNDDSYLLSVKDHVQSLFYEPVDI

SEQ ID NO: 245 - protein, 549 aa, Helianthus annuus
MPYLMFHTTYYINHIQLKRNKGMASQAYITSIFSHKVLYQRQLIIIPPFKGSKNCRSIFSSAQACPNTITSATEELIDTLSPLSMTDTVSYSGDRNSLILDHYGMMVIPPHDVNNRIEELKEYTRRALMNTSDSTMTLKLIDTIQRLGVGYYYEEEEIRKILKKLTHVLPKDDLYTVALHFRLQRHYGLHTNPAGLKLPRHMRMERLEARRYIEEYGNEDDHNPFVLEFAKYDYNKVQSVFQRELVEVNRWWEHLGLSSKLGFVRDRHVECFLWTVGLLPEPSFSGSRIELAKTIAIMLVIDDIYDTYGSYDDLVLFTEAIKRWDLNAIEQLPEYMKICYQALYNTNNEICDKIKKERCLSVQPFLRKTWIDMAEAYMVEAEWVKRGRIPTLNDYIENGVTTSGTYMALVHLFFLISYGLTTENMKHLLDPYPKFFTMAGTILRLWDDLGTIKEEQERGDMLSSIHLLMKEENITCEEEGREGILQMIYALWNDLNVELLTPDAVLFRMIKVALNMSRTSQVVYQHNDDSYLLSVKDHVQSLFYEPVDI

SEQ ID NO: 246 - protein, 508 aa, Olea europaea
MENINCSERIEELRENTRKALRRALDPMAAMELIDTLQWLGIAYNYEEEIDSWLNKLINWDAGDDLHATGLRFRLLRTEGLPVSCDVFEKFMEKNGKFKESISQDTRGLLSLYEASSLGASGEDILSEAMRFAVTHLRLSIPSMGKQLCRQVTRALELPRHLRMARLESRLYIDEYSMGSNFSQILLEQAKLDYNKVQSLHQIELAELSRWWKQLGLVEKLKFGRDRPMECYFWTVGILPDPKYSQARIELAKTIAILLVIDDIFDTYGSINELLLFNDAIQKWNLDAIEQLPAYMKICYMALYNNTNEIAYSILKEQGRNVLPSLKQVWMNTIEAFMIEANWFNSGHVPNLANYLKNAVTTSGSYMALVHIFFLLGEGISHGNVKSMEKPYPKIFSCSGQILRLWDDLGTSKEEQDRGDNASSIPLFMKEKNLPSEDEARECIMQLIGNLWKELNTELLSSSLPLPIIRACFNMSRTSEVIYQHEEDSYSSGVDNFVKFLLLEPIGL

SEQ ID NO: 247 - protein, 605 aa, Olea europaea
MLPQSHIALDRHKLRESEKIDESAHKPLEQQGRENVIGNDRMAIERIDIAVVSAIRSTNKDFNIERTAKLGVKVFTGTVDPAVAQAWMTKIERVLHTMENINSSERIEELRENTRKVLRRALDPMAAMELIDTLQWIGIAYNYEEEIDSWLNKLISWDAGDDLHATALRFRLLRSEGLPVSCDVFKKFMEKNGKFKESISQDTRGLLSLYEASSLGASGEDILSEAMRFAVTQLRLSMPSMGKQLCRQVTRALELPRHLRMARLESRLYIDEYSMGSNFNQILLEQAKLDYNKVQSLHQIELAELSRWWKQLGLVEKLKFGRDRPMECYFWTVGILPDPKYSQPRIELAKTIAILLVIDDIFDTYGSINELLLFNDAIQKWNLDAIEQLPAYMKICYMALYNTSNEIAYNILKEQGRNVLPSLKRVWMNTIEAFMIEANWFSSGHVPDLANYLKNAVTTSGSYMALVHIFFLLGEGISHGNVKSMEKPYPKIFSCSGQILRLWDDLGTSKEEQDRGDNASSIPLFMKEKNLPSEGEARECIMQLIGNLWKELNTELLSSSLPLPIIRACFNMSRTSQVIYQHEEDSYSSGVDNFVKFLLLEPIGL

SEQ ID NO: 248 - protein, 508 aa, Olea europaea
MDKTICSKGIEELQERTRNALQRALDPMAAMELIDTLQWLGIAYNYEEEIDSWLNKLINWDAGDDLHATALRFRLLRTDGFPVSSDVFKKFMEKNGKFKESISQDTRGLLSLYEASSLGASGEDILSEAMRFAVTHLRLSMPSMGKRLCRQVTRALELPRHLRMARLESRLYIDEYSMGSNFNQILLEQAKLDYNKVQSLHQIELAELSRWWKQLGLVEKLKFGRDRPMECYFWTIGILPDPKYSQPRIELAKTIAILLVIDDIFDTYGSINELLLFNDAIQKWNLDAIEQLPAYMKICYMALYNTTNEIAYNILKEQGRNVLPSLKRVWMNTIEAFMIEANWFNSGHVPDLANYLKNAVTTSGSYMALVHIFFLLGEGISHGNVKSMEKPYPKIFSCSGQILRLWDDLGTSKEEQDRGDNASSIPLFMKEKNLPSEGEARECIMQLIGNLWKELNTELLSSSWPLPIIRACFNMSRTSQVIYQHEEDSYSSGVDNFVKFLLLEPIGL

SEQ ID NO: 249 - protein, 514 aa, Olea europaea
MKVLHTMENINCSKRIEELQENTRKALQRALDPMAAMELIDTLQWLGIAYNYEEEIDSWLNKLINWDAGDDLHATGLRFRLLRTEGLPVSCDVFKKFMEKNGKFKESISQDTRGLLSLYEASSLGASGEDILSEAMRFAVTQLRLSMPSMGKQLCRQVTRALELPRHLRMARLESRLYIDEYSMGSNFNQILLEQAKLDYNKVQSLHQIELAELSRWWKQLGLVEKLKFGRDRPMECYFWTVGILPDPKYSQPRIELAKTIAILLVIDDIFDTYGSINELVLFNDAIQKWNLDAIEPLPAYMKICYMALYNTTNEIAYNILKEQGRNVLPSLKRVWMNTIEAFMIEANWFNSGHVPNLANYLKNAVTTSGSYMALVHIFFLLGEGISHGNVKSMEKPYPKIFSCSGQILRLWDDLGTSKEEQDRGDNASSIPLFMKEKNLASEGEARECIMQLIGNLWKELNTELLSSSLPLPIIRACFNMSRTSEVIYQHEEDSYSSGVDNFVKFLLLEPIGL

SEQ ID NO: 250 - protein, 493 aa, Catharanthus roseus
MDYLTIILTLLFALTLYEAFSYLSRRTKNLPPGPSPLPFIGSLHLLGDQPHKSLAKLSKKHGPIMSLKLGQITTIVISSSTMAKEVLQKQDLAFSSRSVPNALHAHNQFKFSVVWLPVASRWRSLRKVLNSNIFSGNRLDANQHLRTRKVQELIAYCRKNSQSGEAVDVGRAAFRTSLNLLSNLIFSKDLTDPYSDSAKEFKDLVWNIMVEAGKPNLVDFFPLLEKVDPQGIRHRMTIHFGEVLKLFGGLVNERLEQRRSKGEKNDVLDVLLTTSQESPEEIDRTHIERMCLDLFVAGTDTTSSTLEWAMSEMLKNPDKMKKTQDELAQVIGRGKTIEESDINRLPYLRCVMKETLRIHPPVPFLIPRKVEQSVEVCGYNVPKGSQVLVNAWAIGRDETVWDDALAFKPERFMESELDIRGRDFELIPFGAGRRICPGLPLALRTVPLMLGSLLNSFNWKLEGGMAPKDLDMEEKFGITLQKAHPLRAVPSTL

SEQ ID NO: 251 - protein, 493 aa, Catharanthus roseus; identical to SEQ ID NO: 250

SEQ ID NO: 252 - protein, 493 aa, Catharanthus roseus; identical to SEQ ID NO: 250

SEQ ID NO: 253 - protein, 493 aa, Catharanthus roseus; identical to SEQ ID NO: 250

SEQ ID NO: 254 - protein, 493 aa, Catharanthus roseus; identical to SEQ ID NO: 250

SEQ ID NO: 255 - protein, 518 aa, Catharanthus roseus
MSATKSIVGEALEYVNIGLSHFLALPLAQRISLIIIIPFIYNIVWQLLYSLRKDRPPGPSPLPFIGSLHLLGDQPHKSLAKLSKKHGPIMSLKLGQITTIVISSSTMAKEVLQKQDLAFSSRSVPNALHAHNQFKFSVVWLPVASRWRSLRKVLNSNIFSGNRLDANQHLRTRKVQELIAYCRKNSQSGEAVDVGRAAFRTSLNLLSNLIFSKDLTDPYSDSAKEFKDLVWNIMVEAGKPNLVDFFPLLEKVDPQGIRHRMTIHFGEVLKLFGGLVNERLEQRRSKGEKNDVLDVLLTTSQESPEEIDRTHIERMCLDLFVAGTDTTSSTLEWAMSEMLKNPDKMKKTQDELAQVIGRGKTIEESDINRLPYLRCVMKETLRIHPPVPFLIPRKVEQSVEVCGYNVPKGSQVLVNAWAIGRDETVWDDALAFKPERFMESELDIRGRDFELIPFGAGRRICPGLPLALRTVPLMLGSLLNSFNWKLEGGMAPKDLDMEEKFGITLQKAHPLRAVPSTL

SEQ ID NO: 256 - protein, 496 aa, Catharanthus roseus
MELLKLLCLILFLTLSYVAFAIIVPPLNFPKNIPPGPSPLPFIGSLHLLGDQPHKSLAKLSKKHGPIMSLKLGQITTIVISSSTMAKEVLQKQDLAFSSRSVPNALHAHNQFKFSVVWLPVASRWRSLRKVLNSNIFSGNRLDANQHLRTRKVQELIAYCRKNSQSGEAVDVGRAAFRTSLNLLSNLIFSKDLTDPYSDSAKEFKDLVWNIMVEAGKPNLVDFFPLLEKVDPQGIRHRMTIHFGEVLKLFGGLVNERLEQRRSKGEKNDVLDVLLTTSQESPEEIDRTHIERMCLDLFVAGTDTTSSTLEWAMSEMLKNPDKMKKTQDELAQVIGRGKTIEESDINRLPYLRCVMKETLRIHPPVPFLIPRKVEQSVEVCGYNVPKGSQVLVNAWAIGRDETVWDDALAFKPERFMESELDIRGRDFELIPFGAGRRICPGLPLALRTVPLMLGSLLNSFNWKLEGGMAPKDLDMEEKFGITLQKAHPLRAVPSTL

SEQ ID NO: 257 - protein, 535 aa, Catharanthus roseus
MSSVAENIIQHATHNSTLHQLAKDQPSVGVTTAFSILDTLKSMSYLKIFATLICILLVWDQVAYQIKKGSIAPPGPSPLPFIGSLHLLGDQPHKSLAKLSKKHGPIMSLKLGQITTIVISSSTMAKEVLQKQDLAFSSRSVPNALHAHNQFKFSVVWLPVASRWRSLRKVLNSNIFSGNRLDANQHLRTRKVQELIAYCRKNSQSGEAVDVGRAAFRTSLNLLSNLIFSKDLTDPYSDSAKEFKDLVWNIMVEAGKPNLVDFFPLLEKVDPQGIRHRMTIHFGEVLKLFGGLVNERLEQRRSKGEKNDVLDVLLTTSQESPEEIDRTHIERMCLDLFVAGTDTTSSTLEWAMSEMLKNPDKMKKTQDELAQVIGRGKTIEESDINRLPYLRCVMKETLRIHPPVPFLIPRKVEQSVEVCGYNVPKGSQVLVNAWAIGRDETVWDDALAFKPERFMESELDIRGRDFELIPFGAGRRICPGLPLALRTVPLMLGSLLNSFNWKLEGGMAPKDLDMEEKFGITLQKAHPLRAVPSTL

SEQ ID NO: 258 - protein, 538 aa, Catharanthus roseus
MQYKLALNGKTLKGETTTEAVDAATAEKVFKQYANDNGVDGEWTYDDATKTFTVTEGGGSLYEAFSYLSRRTKNLPPGPSPLPFIGSLHLLGDQPHKSLAKLSKKHGPIMSLKLGQITTIVISSSTMAKEVLQKQDLAFSSRSVPNALHAHNQFKFSVVWLPVASRWRSLRKVLNSNIFSGNRLDANQHLRTRKVQELIAYCRKNSQSGEAVDVGRAAFRTSLNLLSNLIFSKDLTDPYSDSAKEFKDLVWNIMVEAGKPNLVDFFPLLEKVDPQGIRHRMTIHFGEVLKLFGGLVNERLEQRRSKGEKNDVLDVLLTTSQESPEEIDRTHIERMCLDLFVAGTDTTSSTLEWAMSEMLKNPDKMKKTQDELAQVIGRGKTIEESDINRLPYLRCVMKETLRIHPPVPFLIPRKVEQSVEVCGYNVPKGSQVLVNAWAIGRDETVWDDALAFKPERFMESELDIRGRDFELIPFGAGRRICPGLPLALRTVPLMLGSLLNSFNWKLEGGMAPKDLDMEEKFGITLQKAHPLRAVPSTL

SEQ ID NO: 259 - protein, 480 aa, Catharanthus roseus
MALYEAFSYLSRRTKNLPPGPSPLPFIGSLHLLGDQPHKSLAKLSKKHGPIMSLKLGQITTIVISSSTMAKEVLQKQDLAFSSRSVPNALHAHNQFKFSVVWLPVASRWRSLRKVLNSNIFSGNRLDANQHLRTRKVQELIAYCRKNSQSGEAVDVGRAAFRTSLNLLSNLIFSKDLTDPYSDSAKEFKDLVWNIMVEAGKPNLVDFFPLLEKVDPQGIRHRMTIHFGEVLKLFGGLVNERLEQRRSKGEKNDVLDVLLTTSQESPEEIDRTHIERMCLDLFVAGTDTTSSTLEWAMSEMLKNPDKMKKTQDELAQVIGRGKTIEESDINRLPYLRCVMKETLRIHPPVPFLIPRKVEQSVEVCGYNVPKGSQVLVNAWAIGRDETVWDDALAFKPERFMESELDIRGRDFELIPFGAGRRICPGLPLALRTVPLMLGSLLNSFNWKLEGGMAPKDLDMEEKFGITLQKAHPLRAVPSTL

SEQ ID NO: 260 - protein, 486 aa, Catharanthus roseus
MALLLAVFLYEAFSYLSRRTKNLPPGPSPLPFIGSLHLLGDQPHKSLAKLSKKHGPIMSLKLGQITTIVISSSTMAKEVLQKQDLAFSSRSVPNALHAHNQFKFSVVWLPVASRWRSLRKVLNSNIFSGNRLDANQHLRTRKVQELIAYCRKNSQSGEAVDVGRAAFRTSLNLLSNLIFSKDLTDPYSDSAKEFKDLVWNIMVEAGKPNLVDFFPLLEKVDPQGIRHRMTIHFGEVLKLFGGLVNERLEQRRSKGEKNDVLDVLLTTSQESPEEIDRTHIERMCLDLFVAGTDTTSSTLEWAMSEMLKNPDKMKKTQDELAQVIGRGKTIEESDINRLPYLRCVMKETLRIHPPVPFLIPRKVEQSVEVCGYNVPKGSQVLVNAWAIGRDETVWDDALAFKPERFMESELDIRGRDFELIPFGAGRRICPGLPLALRTVPLMLGSLLNSFNWKLEGGMAPKDLDMEEKFGITLQKAHPLRAVPSTL

SEQ ID NO: 261 - protein, 523 aa, Catharanthus roseus
MQYKLALNGKTLKGETTTEAVDAATAEKVFKQYANDNGVDGEWTYDDATKTFTVTEGGGSPPGPSPLPFIGSLHLLGDQPHKSLAKLSKKHGPIMSLKLGQITTIVISSSTMAKEVLQKQDLAFSSRSVPNALHAHNQFKFSVVWLPVASRWRSLRKVLNSNIFSGNRLDANQHLRTRKVQELIAYCRKNSQSGEAVDVGRAAFRTSLNLLSNLIFSKDLTDPYSDSAKEFKDLVWNIMVEAGKPNLVDFFPLLEKVDPQGIRHRMTIHFGEVLKLFGGLVNERLEQRRSKGEKNDVLDVLLTTSQESPEEIDRTHIERMCLDLFVAGTDTTSSTLEWAMSEMLKNPDKMKKTQDELAQVIGRGKTIEESDINRLPYLRCVMKETLRIHPPVPFLIPRKVEQSVEVCGYNVPKGSQVLVNAWAIGRDETVWDDALAFKPERFMESELDIRGRDFELIPFGAGRRICPGLPLALRTVPLMLGSLLNSFNWKLEGGMAPKDLDMEEKFGITLQKAHPLRAVPSTL

SEQ ID NO: 262 - protein, 465 aa, Catharanthus roseus
MAPPGPSPLPFIGSLHLLGDQPHKSLAKLSKKHGPIMSLKLGQITTIVISSSTMAKEVLQKQDLAFSSRSVPNALHAHNQFKFSVVWLPVASRWRSLRKVLNSNIFSGNRLDANQHLRTRKVQELIAYCRKNSQSGEAVDVGRAAFRTSLNLLSNLIFSKDLTDPYSDSAKEFKDLVWNIMVEAGKPNLVDFFPLLEKVDPQGIRHRMTIHFGEVLKLFGGLVNERLEQRRSKGEKNDVLDVLLTTSQESPEEIDRTHIERMCLDLFVAGTDTTSSTLEWAMSEMLKNPDKMKKTQDELAQVIGRGKTIEESDINRLPYLRCVMKETLRIHPPVPFLIPRKVEQSVEVCGYNVPKGSQVLVNAWAIGRDETVWDDALAFKPERFMESELDIRGRDFELIPFGAGRRICPGLPLALRTVPLMLGSLLNSFNWKLEGGMAPKDLDMEEKFGITLQKAHPLRAVPSTL

SEQ ID NO: 263 - protein, 471 aa, Catharanthus roseus
MALLLAVFPPGPSPLPFIGSLHLLGDQPHKSLAKLSKKHGPIMSLKLGQITTIVISSSTMAKEVLQKQDLAFSSRSVPNALHAHNQFKFSVVWLPVASRWRSLRKVLNSNIFSGNRLDANQHLRTRKVQELIAYCRKNSQSGEAVDVGRAAFRTSLNLLSNLIFSKDLTDPYSDSAKEFKDLVWNIMVEAGKPNLVDFFPLLEKVDPQGIRHRMTIHFGEVLKLFGGLVNERLEQRRSKGEKNDVLDVLLTTSQESPEEIDRTHIERMCLDLFVAGTDTTSSTLEWAMSEMLKNPDKMKKTQDELAQVIGRGKTIEESDINRLPYLRCVMKETLRIHPPVPFLIPRKVEQSVEVCGYNVPKGSQVLVNAWAIGRDETVWDDALAFKPERFMESELDIRGRDFELIPFGAGRRICPGLPLALRTVPLMLGSLLNSFNWKLEGGMAPKDLDMEEKFGITLQKAHPLRAVPSTL

SEQ ID NO: 264 - protein, 492 aa, Nepeta cataria
MDFLTIFIGPLLAIIALFYARLTISTRGKNLPPGPTPLPFIGNLHLLGHHPHKSLARLAKTYGPLMLLRLGSENTVVVSSAAVAKEVLQKHDLAFSSRSIPDAVHAHDQFKYSVVWLPVASRWRSLRKTMNSNIFSGSCLDANQHLRSRKVEELIAYCKESCRRAEAVDVGRAAFRTALNSLSNTIFSRDLADPLSDSGKEFKDVVSSIMMEAGKPNSVDYYPFLSRFDPQGIRRRTAIYFDKLINIFKGLIDERLEKRRSQYEEATDVIDILLNTIEQNPEEIDRTHIERMFLDLFLAGTDTTSSTVEWAMAEAMKNPETMKKAKAELAQVIGKGKIVQETDIPHLPYLQCIVKETLRLHPPVPFLIPRRVHEDVDILGYVVPNNSQVFVNMWAIGRDPDMWKNPLQFDPDRFHDSEVGLRGKDFELIPFGAGRRICPGLPLAMRMVPVVLGSLLNSFDWKVEGGKELEMNEKFGITLEKAQPLMAVPIAL

SEQ ID NO: 265 - protein, 490 aa, Nepeta mussinii
MDFLTITVGLVSAIIITFIYGFSLSRRGKNLPPGPTPLPLIGSLHLLGGQPHKSLARLANIYGPLMRLRLGSVNTIVVSSAAVAREVLQKHDLAFSSRSIPDALHAHDHFKYSVVWLPVASRWRSLRKTMNSNIFSGSRLDANQHLRSRKVEELVDYCRECSRTAEAVHVGRAAFRTVLNSLSNTIFSKDLADPFSDSGKEFKEIVSNIMKEAGMPNLVDFFPFLARFDPQGIRRRTTVYFGKIIHLFSGLIQEKLENTNQEENIDVIQILLNTSRQSPQEIDRTHIERMCLDLFVAGTDTSSSTVEWAMAEALKNLETMKTAKVELEQVIGKGKTIQETDVSRLPYLQCMVKETLRLHPPVPFLIPRTVDQDVEVLGHVVPKNSRVFVNMWAIGRDPDVWENPLEFNPRRFLDSEVDVRGTNFELIPFGAGRRICPGLPLAMRMVPVMLGSLLNSFDWKLEGGENLDMDEKFGITLEKAQPLRVVPISL

SEQ ID NO: 266 - protein, 492 aa, Nepeta cataria; identical to SEQ ID NO: 264

SEQ ID NO: 267 - protein, 490 aa, Nepeta mussinii; identical to SEQ ID NO: 265

SEQ ID NO: 268 - protein, 492 aa, Nepeta cataria; identical to SEQ ID NO: 264

SEQ ID NO: 269 - protein, 490 aa, Nepeta mussinii; identical to SEQ ID NO: 265

SEQ ID NO: 270 - protein, 492 aa, Nepeta cataria; identical to SEQ ID NO: 264

SEQ ID NO: 271 - protein, 490 aa, Nepeta mussinii; identical to SEQ ID NO: 265

SEQ ID NO: 272 - protein, 501 aa, Vigna angularis
METNSTLFFTFTVLLITIITFLKALKSLFTPNKSKSNLPPGPKGLPLVGNLLQLGAKPHQTLATLANIHGSIMSLKLGQETTIVMSSAEAAKGVLQIHDHFLSNRKIPDAMRGSSHDHFSLPFMPVSQQWRELRKLCNELLFSNKNLDATQGLRSKKVRELYSDIHRSSLKGEPVNIGRLAFKTTINQLSNTIYSEDFLQSAEKAGEMKELVTNIMKEVGRPNLADCFPVLKMIDPHGIRRRTGSYFSKLLNIFKSLIHKRLELRKDAAGYCTKKDMLDAMLNDAQHKMDIVKIQRLSLDLFVAGTDTVTSTVEWAMAELLHNPHVMSKAKEELERIIGKDNLVEESDIAKLPYLQAIVKETFRLHPAVPLLLPRKAEVEFEMHGYTIPKGAQVLINVWAIGRDPNLWEKPRLFWPERFLESEIDFKGRSFELTPFGGGRRICPGLPLAIRLVFLMLGLFINSFDWELQDIQPEDMNMDENFGLTLEKAQPVLAIPIIPKH

SEQ ID NO: 273 - protein, 1048 aa, Bacillus megaterium
MTIKEMPQPKTFGELKNLPLLNTDKPVQALMKIADELGEIFKFEAPGRVTRYLSSQRLIKEACDESRFDKNRLWPTVPLFSLYAKEDTVWTHEKNWKKAHNILLPSFSQQAMKGYHAMMVDIAVQLVQKWERLNADEHIEVPEDMTRLTLDTIGLCGFNYRFNSFYRDQPHPFITSMVRALDEAMNKLQRANPDDPAYDENKRQFQEDIKVMNDLVDKIIADRKASGEQSDDLLTHMLNGKDPETGEPLDDENIRYQIITFLIAGHETTSGLLSFALYFLVKNPHVLQKAAEEAARVLVDPVPSYKQVKQLKYVGMVLNEALRLWPTAPAFSLYAKEDTVLGGEYPLEKGDELMVLIPQLHRDKTIWGDDVEEFRPERFENPSAIPQHAFKPFGNGQRACIGQQFALHEATLVLGMMLKHFDFEDHTNYELDIKETLTLKPEGFVVKAKSKKIPLGGIPSPSTEQSAKKVRKKAENAHNTPLLVLYGSNMGTAEGTARDLADIAMSKGFAPQVATLDSHAGNLPREGAVLIVTASYNGHPPDNAKQFVDWLDQASADEVKGVRYSVFGCGDKNWATTYQKVPAFIDETLAAKGAENIADRGEADASDDFEGTYEEWREHMWSDVAAYFNLDIENSEDNKSTLSLQFVDSAADMPLAKMHGAFSTNVVASKELQQPGSARSTRHLEIELPKEASYQEGDHLGVIPRNYEGIVNRVTARFGLDASQQIRLEAEEEKLAHLPLAKTVSVEELLQYVELQDPVTRTQLRAMAAKTVCPPHKVELEALLEKQAYKEQVLAKRLTMLELLEKYPACEMKFSEFIALLPSIRPRYYSISSSPRVDEKQASITVSVVSGEAWSGYGEYKGIASNYLAELQEGDTITCFISTPQSEFTLPKDPETPLIMVGPGTGVAPFRGFVQARKQLKEQGQSLGEAHLYFGCRSPHEDYLYQEELENAQSEGIITLHTAFSRMPNQPKTYVQHVMEQDGKKLIELLDQGAHFYICGDGSQMAPAVEATLMKSYADVHQVSEADARLWLQQLEEKGRYAKDVWAG

SEQ ID NO: 274 - protein, 1048 aa, Bacillus megaterium; identical to SEQ ID NO: 273

SEQ ID NO: 275 - protein, 498 aa, Camptotheca acuminata
MDFFSFLLYFLFTLSLVQATISLVRGSKHKGRKLPPGPAPLPIVGNLLKLGDQPHKSLADLAKIHGPIMTLKLGHITTVIISSSDLAKEVLQKQDLAFSSRSIPDAIRAHNQFQYSVVWLPVANQWRSLRKILNSNIFSGNRLDANQHLRWRKVQELIAYVRKSSQVGDAVDIGRAAFRTSLNLLSNTIFSVDLADPNNDSAKEFKDLVSNIMVEAGKPNLVDYFPVLEKIDPQGIRRRMTIHFGKVLEMFGRLINERLEFRRLRSSVISNDVLDVLLNTEESGNEIDRNHIERMCLDLFVAGTDTTSSTLEWAMAEVLHNPETLVKAKAELEQIIGRGKAIEESDISNLPYLRSIIKETLRLHPPVPFLIPRKVEVDSEVSGYTVPKGSQVLVNAWAIGRDPCCWENPLNFSPERFLNSELDVRGRDFELIPFGAGRRICPGLPLAIRMVPVMLGSLLNSFDWKLDGGIKPEELDMEEKFGITLQKAQPLRAVPTLV

SEQ ID NO: 276 - protein, 493 aa, Vinca minor
MDYLTIALGLLFALTFYQGLTYLSRRSQKLPPGPLPLPIIGNLHLLGDHPHKSLAKLSKKYGPIMSLKLGRITTLVISSSTTAKEVLQKQDLAFSSRSVPNALHAHNQFQYSVVWLPVASRWRSLRKILNSNIFSGNRLDANQHLRCRKVEELIAYCRKNCQSGEAVDLGRAAFRTSLNLLSNTIFSKDLTDPYSDSAKEFKDLVWNIMVEAGKPNLVDFFPVLEKVDPQGIRRRMTVHFGKVIQLFNGLINERLDKRKSRGGYNDVLDVLLTTTEENPEEIDRTHIERMCLDLFVAGTDTTSSTLEWAMAEMLRNPEKMKKTQEELAEVVGRGKLIEEGDVSRLPYLRCVVKETLRVHPPVPFLIPRKVVQDVEVCGYKVPKGSQVLVNAWAIGRDETFWKDALGFKPERFLESELDTRGRDFELIPFGAGRRICPGLPLANRMVPVMLGSLLNSFNWKLEGGIAPKDLDMEEKFGITLQKAHPLRAVPSPL

SEQ ID NO: 277 - protein, 493 aa, Ophiorrhiza pumila
MDYLTIALGLLFALTLIQGWSFLSRRSKKLPPGPTPLPIIGNLHLLGDQPHKSLAKLAKTHGPLMSLKLGQITTLAISSSGMAKEVLQKQDLAFSSRSIPDAIHAHNQFQYSVVWLPVATRWRSLRKILNSNIFSGNRLDANQHLRCRKVQELIAYCRKNCQTGEAVDIGRAAFRTSLNLLSNTIFSKDLTDPYSDSAKEFKDLVWNIMVEAGKPNLVDFFPVLEKFDPQGIRRRMTIHFGKVLEMFGGLINERLDNGKSRGGNNDVLDVLLNASEETPDEIDRTHIERLCLDLFVAGTDTTSNTLEWAMAEMLKTPEKMKKAKAELAEVIGKGKAIEEADVSRLPYLRCIVKETLRLHPPVPFLIPRKVEQDVEVCGYNVPKGTQVLVNAWAIGRDETTWENALEFKPERFLESELDIRGRDFELIPFGAGRRICPGLPLAVRMVPVMLGSLLNSFDWKLGGSIAPKDLDMEEKFGITLQKANPLLAVPISL

SEQ ID NO: 278 - protein, 493 aa, Rauvolfia serpentina
MDYLTITLGLLFALTFYQGLSYLSRRSKKLPPGPAPLPIIGNLHMLGDQPHKSLAKLSKKHGPIMSLKLGQITTVVVSSSGMAKEVLQKHDLAFSSRSIPNALHAHNQYQFSVVWLPVASRWRSLRKTLNSNIFSGNRLDANQHLRSRKVEELIAYCRKNCQTGEAVDVGRAAFRTSLNLLSNLIFSKDLTDPYSDSAKEFKDLVWNIMVEAGKPNLVDYFPVLEKVDPQGIRRRMTVHFGKVLKLFDGLVNERLEQRRSRGGKNDVLDVLLTNSEENPEEIDRTHIERMCLDLFVAGTDTTSSTLEWAMAEMLKNPDKMKKTQAELAEVIGRGKAIEESDLPRLPYLRCVVKETLRIHPPVPFLIPRRVEQDVEVCGYKVPKGSQVLVNAWTIGRDEAVWEDALAFKPERFLESELDIRGRDFELIPFGAGRRICPGLPLALRTVPLMVGSLLNSFNWKLEGGITPKDLDMEEKFGITLQKAHPLRAVPIPF

SEQ ID NO: 279 - protein, 498 aa, Lonicera japonica
MDFFTIALSLLFAFTLFKAIISLTKSGKNKNLPPGPAPLPIIGSLHKLGDQPHQSLAKLAKIYGPIMSLKLGRITTVVISSSDAAKEVLQKKDLAFSSRHVPDALHAHNQFKFSVVWLPVAPQWRSLRKILNSNIFSGNRLDANQHLRCRKVEELITYCRKSSHSGDAVDIGRAAFRTSLNLLSNTIFSKDLTDPYQDSAKEFKELVGNIMVEAGKPNLVDFFPSLKKIDPQGIRHRMTIHFGKVLELFGGLINERLELKSSQKSDEKNDVLDVCLSISKENPDEIDRTHIERMCLDLFVAGTDTTSSTLEWAMAEVLRNPETLVKAKAELEEVIGKGKILAEADVSNLPYLRCIVKETLRIHPPVPFLIPRKVEMDVEACGYTVPKNSQVFVNVWAIGRDPTLWEDPLSFKPERFMASELDVRGRDFELLPFGAGRRICPGLPLAIRMVPVMLGSLVNSFNWKLDGGIAPKELDMGEKFGITLAKAQSLRAVPSPLV

SEQ ID NO: 280 - protein, 491 aa, Erythranthe guttata
MDFITLALVLIFVLIIIHAIQTISTRGKKLPPGPTLLPLIGNLHLLGDQPHKSLCRLAETHGPLMRVRLGFINTVVISSAEMAKEVLQKHDLAFSSRSVPNALLAHDQFKYSAVWLPVGPRWRSLRKALNSNMLSVGRLDFGQNLRCRKVDELVEYCRRSSISGEAVDVGRAAFRTSLNLLSNTIFSKDLTDPFSDSAKELKDLVWNIMLEAGKPNLVDFFPILGKLDPQGIRRRMTVNFGKVIDLLSGLIDERIERGKSDQNADVIDVLLAACKENPEDIDRTHIERICLDLFAAGTDTSSSTVEWAMAEALANSEIMKKAKAELEEVVGKGKVIEEADISRLPYLQCMVKETLRLHPPVPLLIPRRVEDDVDVCGYTVPKNSQVLVNAWAIGRDAGIWENPLEFKPERFVGSEVDVKGRDFELIPFGGGRRICPGLPLAVKMVPVMVGSLLNSFDWKIEYSGIGEFDMEEKFGITLQKARPLLAVPIPL

SEQ ID NO: 281 - protein, 494 aa, Picrorhiza kurrooa
MDFLTIILGLLFAITLIHGYQLLSSKGKRLPPGPTPLPLIGSLHLLGDQPHQSLAKLAKKHGELMCLRLGFINTIVISSAAMAKEVLQKQDLAFSSRMSPNAVHAHDQFKYSVVWLPVAARWRSLRKVLNSKIFSGNRMDANQHLRGRKRQELIAYCRKRSQTGGAGDMGRAPFRNPVNLAVEHDFFKRIEDPYSDSAKEFKDLVWNIMLEAGKPNLVDFYPVLEKVDPQGIRKRMTVHFGKVIELFSGLINERTEKGKTQDAGTTDVIDVLLKISKENPDEIDRTHIERLCLDLFVAGTDTTSNTLEWAMAESLKNPEIMKKAKAELEQVIGKGKVLDEADIQRLPYLRCMVKETLRIHPPVPFLIPRKVEQDVEVCGYTVPKNSQVFVNAWAIGRDAETWPNPLEFKPERFMESEVDMRGRDFELIPFGAGRRICPGLPLALRMVPVMLGSLLNSFDWKLEGGAGPKELDMEEKFGITLQKALPLMAVPVPL

SEQ ID NO: 282 - protein, 494 aa, Olea europaea
MDFLTIVLGLLFALTLIQAFRSISTRGKNLPPGPTPLPIIGNLHLLGDQPHKSLAKLAKTYGPIMCLRFGSINTVVITSSAMAKEVLQKQDLAFSSRHIPNAIHAHNQFKYSVVWLPVASTWRSLRKILNSNMFSGNRLDANQHLRVRKVQELITYCRKNSQAGEAVDIGRAAFRTSLNLLSNTIFSKDLTDPFSDSAKEFKDLVWNVMVEAGKPNLVDFFPVLEKLDPLGIRRRMTIHFGKIIELFGGLINERLKRRMSDNSKNSDVLDVLLDTSQENPEEIDRVHIERLCLDLFVAGTDTTSSTLEWAMAETLKNPATMKKAKAELEEVIGKGKVLEEADVSRLPYLRCMVKEALRIHPPVPFLIPRRVEQDVEVSGYTVPKNSQVLVNAWAIGRDPTLWENPLEFKPERFMESELDIRGRDFELIPFGAGRRICPGLPLAIRMVPVMLGSLVNSFDWKLEGGISPKDLDMEEKFGITLQKANPLRAVPTPL

SEQ ID NO: 283 - protein, 493 aa, Gentiana rigescens
MDYLTIALGFLFALTLYQALISFSRKSKNLPPGPAPLPFIGNLHLLGDQPHKSLAKLAKKHGPIMGLQFGQVTTIVVTSSGMAKEVLQKQDLAFSSRSVPNALHAHDQYKYSVIWLPVASQWRSLRKVLNSNIFSGNRLDANQHLRCRKVQELIAYCRKNCQTGEAVDLGRAAFRTSLNLLSNTIFSKDLTDPYSDSAKEFKDLVWNVMVEAGKPNLVDFFPVLDKVDPQGIRKRMTFHFGKILQLFGGLINERLQQNKAKGAHKDVLDVLLKTSQETPDELNRTHIERMCLDLFVAGTDTTSSTLEWAMAEMLKSPDKMNKAKEELAQVIGKGKAVEEADIASLPYLRCAIKETLRIHPPVPFLIPRRTEQEVEVCGYTVPKNSQVFVNVWAIGRDETTWPDALEFKPERFLESEIDMRGRDFELLPFGAGRRICPGFPLAVRMVPVMLGSLLNSFDWKLEGGIAPKDLDMEEKFGITLQKAHPLRAIPTSL

SEQ ID NO: 284 - protein, 492 aa, Nepeta cataria; identical to SEQ ID NO: 264

SEQ ID NO: 285 - protein, 688 aa, Arabidopsis thaliana
MTSALYASDLFKQLKSIMGTDSLSDDVVLVIATTSLALVAGFVVLLWKKTTADRSGELKPLMIPKSLMAKDEDDDLDLGSGKTRVSIFFGTQTGTAEGFAKALSEEIKARYEKAAVKDDYAADDDQYEEKLKKETLAFFCVATYGDGEPTDNAARFYKWFTEENERDIKLQQLAYGVFALGNRQYEHFNKIGIVLDEELCKKGAKRLIEVGLGDDDQSIEDDFNAWKESLWSELDKLLKDEDDKSVATPYTAVIPEYRVVTHDPRFTTQKSMESNVANGNTTIDIHHPCRVDVAVQKELHTHESDRSCIHLEFDISRTGITYETGDHVGVYAENHVEIVEEAGKLLGHSLDLVFSIHADKEDGSPLESAVPPPFPGPCTLGTGLARYADLLNPPRKSALVALAAYATEPSEAEKLKHLTSPDGKDEYSQWIVASQRSLLEVMAAFPSAKPPLGVFFAAIAPRLQPRYYSISSSPRLAPSRVHVTSALVYGPTPTGRIHKGVCSTWMKNAVPAEKSHECSGAPIFIRASNFKLPSNPSTPIVMVGPGTGLAPFRGFLQERMALKEDGEELGSSLLFFGCRNRQMDFIYEDELNNFVDQGVISELIMAFSREGAQKEYVQHKMMEKAAQVWDLIKEEGYLYVCGDAKGMARDVHRTLHTIVQEQEGVSSSEAEAIVKKLQTEGRYLRDVW

SEQ ID NO: 286 - protein, 714 aa, Catharanthus roseus
MDSSSEKLSPFELMSAILKGAKLDGSNSSDSGVAVSPAVMAMLLENKELVMILTTSVAVLIGCVVVLIWRRSSGSGKKVVEPPKLIVPKSVVEPEEIDEGKKKFTIFFGTQTGTAEGFAKALAEEAKARYEKAVIKVIDIDDYAADDEEYEEKFRKETLAFFILATYGDGEPTDNAARFYKWFVEGNDRGDWLKNLQYGVFGLGNRQYEHFNKIAKVVDEKVAEQGGKRIVPLVLGDDDQCIEDDFAAWRENVWPELDNLLRDEDDTTVSTTYTAAIPEYRVVFPDKSDSLISEANGHANGYANGNTVYDAQHPCRSNVAVRKELHTPASDRSCTHLDFDIAGTGLSYGTGDHVGVYCDNLSETVEEAERLLNLPPETYFSLHADKEDGTPLAGSSLPPPFPPCTLRTALTRYADLLNTPKKSALLALAAYASDPNEADRLKYLASPAGKDEYAQSLVANQRSLLEVMAEFPSAKPPLGVFFAAIAPRLQPRFYSISSSPRMAPSRIHVTCALVYEKTPGGRIHKGVCSTWMKNAIPLEESRDCSWAPIFVRQSNFKLPADPKVPVIMIGPGTGLAPFRGFLQERLALKEEGAELGTAVFFFGCRNRKMDYIYEDELNHFLEIGALSELLVAFSREGPTKQYVQHKMAEKASDIWRMISDGAYVYVCGDAKGMARDVHRTLHTIAQEQGSMDSTQAEGFVKNLQMTGRYLRDVW

SEQ ID NO: 287 - protein, 714 aa, Catharanthus roseus; identical to SEQ ID NO: 286

SEQ ID NO: 288 - protein, 688 aa, Arabidopsis thaliana; identical to SEQ ID NO: 285

SEQ ID NO: 289 - protein, 714 aa, Catharanthus roseus; identical to SEQ ID NO: 286

SEQ ID NO: 290 - protein, 688 aa, Arabidopsis thaliana; identical to SEQ ID NO: 285

SEQ ID NO: 291 - protein, 714 aa, Catharanthus roseus; identical to SEQ ID NO: 286

SEQ ID NO: 292 - protein, 712 aa, Nepeta mussinii
MDSTTEKLSPFDLMAAILKGVKLDNSNGSAETSQPAVVAMLMENKDLMMMLTTAVAVLLGCVVYLVWRKGAGSAKKVVEPPKLVLPKALSETEEVDDGKKKVTIFFGTQTGTAEGFAKALAEEAKARYPQANFKVVDMDDYAAEDEEYEEKLTKETMAFFFLATYGDGEPTDNAARFYKWFAEGKERGDSFKNLHYGVFGLGNRQYEHFNKIAIVVDNILAEQGGKRLVPVGLGDDDQCIEDDFAAWRENVWPELDNLLRNEDDASTVSTPYTAAVLEYRVEFHDQSDELSLENSLANGHANGNASYDAQHPCRANVAVKRELHTPLSDRSCTHLEFDISGTGLQYETGDHVGVYCENLIETVEEAERLLGLSPQTYFSVHTDKEDGTPLGGSALPPPFPPCTLRTALSRYADLLNAPKKSALTALAAYASDPTEADRLKHLASPAGKEEYAQYVVASQRTLLEVMADFPSAKPPLGVFFAGVAPRLQPRFYSISSSPKIAPFRIHVTCALVYDKTPTGRIHKGICSTWIKNAVPLEESSDCSSAPIFVRNSNFKLPSDANIPIIMIGPGTGLAPFRGFLQERLALKESGAELGPAILFFGCRNRKMDFIYEDELNDFVKAGVVSELIVAFSREGSTKEYVQHKMAQRASDVWKMISDGGYIYVCGDAKGMARDVHRTLHTIAQEQGSMSSSEAEGMVKNLQMTGRYLRDVW

SEQ ID NO: 293 - protein, 692 aa, Camptotheca acuminata
MSSDSELIRWFESIFGVSLGSNSVSDSVAMFVTTSVAVIIGLLFFLWRRSSDRSKESNPVVVPRPLLVEAEEDEVEVGSGKTKLTIFYGTQTGTAEGFAKALAEEIKARYEKAVVKVVDLDDYADDDEQYEEKLKKETLAFFMVATYGDGEPTDNAARFYKWFTDGKERGLWLQQLKFGVFGLGNRQYEHFNKIGKVLDQDLSEQGGKRLIPVGLGDDDQCIEDDFAAWRELLWPELDQLLRDGDDTNTVSTPYTAVIPEYRVVIYDPTTTSFEDKHLSMANGNASYDIHHPCRVNVAVQRELHKPESDRSCIHLEFDISSTGITYETGDHVGVYADNCDETVEEAARLLGQPLDLLFSIHSDDDNGTPLGGSLPPPFPGPCTLRTALARYADLLNPPRKAALIALAAHAIEPSESEKLKFLSSPQGKDDYSQWVVGSQRSLLEVMAEFPSAKPPLGVFFAAVATRLQPRYYSISSSPRFAPSRVHVTCSLVYGPTSTGRIHKGVCSTWMKNAVPLEKSRNCSWAPIFIRASNFKLPSNPSIPIVMVGPGTGLAPFRGFLQERLALKEDGIQLGPALLFFGCRNRRMDFIYEDELNNFVDRGVLSDLIVAFSREGPQKEYVQHKMMEKAAYIWNLISQEGYLYVCGDAKGMARDVHRTLHTIVQEQENADTSKAESVVKKLQMDGRYLRDVW

SEQ ID NO: 294 - protein, 712 aa, Arabidopsis thaliana
MSSSSSSSTSMIDLMAAIIKGEPVIVSDPANASAYESVAAELSSMLIENRQFAMIVTTSIAVLIGCIVMLVWRRSGSGNSKRVEPLKPLVIKPREEEIDDGRKKVTIFFGTQTGTAEGFAKALGEEAKARYEKTRFKIVDLDDYAADDDEYEEKLKKEDVAFFFLATYGDGEPTDNAARFYKWFTEGNDRGEWLKNLKYGVFGLGNRQYEHFNKVAKVVDDILVEQGAQRLVQVGLGDDDQCIEDDFTAWREALWPELDTILREEGDTAVATPYTAAVLEYRVSIHDSEDAKFNDITLANGNGYTVFDAQHPYKANVAVKRELHTPESDRSCIHLEFDIAGSGLTMKLGDHVGVLCDNLSETVDEALRLLDMSPDTYFSLHAEKEDGTPISSSLPPPFPPCNLRTALTRYACLLSSPKKSALVALAAHASDPTEAERLKHLASPAGKDEYSKWVVESQRSLLEVMAEFPSAKPPLGVFFAGVAPRLQPRFYSISSSPKIAETRIHVTCALVYEKMPTGRIHKGVCSTWMKNAVPYEKSEKLFLGRPIFVRQSNFKLPSDSKVPIIMIGPGTGLAPFRGFLQERLALVESGVELGPSVLFFGCRNRRMDFIYEEELQRFVESGALAELSVAFSREGPTKEYVQHKMMDKASDIWNMISQGAYLYVCGDAKGMARDVHRSLHTIAQEQGSMDSTKAEGFVKNLQTSGRYLRDVW

SEQ ID NO: 295 - protein, 688 aa, Arabidopsis thaliana; identical to SEQ ID NO: 285

SEQ ID NO: 296 - protein, 712 aa, Nepeta mussinii; identical to SEQ ID NO: 292

SEQ ID NO: 297 - protein, 692 aa, Camptotheca acuminata; identical to SEQ ID NO: 293

SEQ ID NO: 298 - protein, 712 aa, Nepeta mussinii; identical to SEQ ID NO: 292

SEQ ID NO: 299 - protein, 692 aa, Camptotheca acuminata; identical to SEQ ID NO: 293

SEQ ID NO: 300 - protein, 495 aa, Swertia mussotii
MDFDFLTIAIGFLFTITLYQALNFFSRKSKNLPPGPSPLPLIGNLHLLGDQPHKSLAKLAKKHGPIMGLQLGQVTTIVVTSSGMAKEVLQKQDLAFSSRSIPNAIHAHDQYKYSVIWLPVASRWRGLRKALNSNMFSGNRLDANQHLRSRKVQELIAYCRKSSQTGDAIDVGRAAFRTSLNLLSNTMFSKDLTDPYSDSAKEFKDLVWNVMVEAGKPNLVDYFPLLDKVDPQGIRKRMTIHFGKILELFGGLIDERLQQKKAKGVNDDVLDVLLTTSEESPEEIDRTHIQRMCLDLFVAGTDTTSSTLEWAMSEMLKNPEKMKAAQAELAQVIGKGKAVEEADLARLPYLRCAIKETLRIHPPVPLLIPRRTEQEVEVCGYTVPKNSQVLVNVWAISRDDAIWKDPLSFKPERFLESELEMRGKDFELIPFGAGRRICPGLPLAVRMVPVMLGSLLNSFDWKLEGGIAPKDLDMEEKFGITLQKAHPLRAVATPL

SEQ ID NO: 301 - protein, 498 aa, Camptotheca acuminata; identical to SEQ ID NO: 275

SEQ ID NO: 302 - protein, 498 aa, Lonicera japonica; identical to SEQ ID NO: 279

SEQ ID NO: 303 - protein, 491 aa, Erythranthe guttata; identical to SEQ ID NO: 280

SEQ ID NO: 304 - protein, 486 aa, Erythranthe guttata
MDFITLFSLGLVFILILMTAVQTISTRGKKLPPGPTPLPLIGNLHLLGDQPHKSLCRLAKTHGPLMYLRLGFINTVVISSAEMAKEVLQKHDLAFSSRSIPNAIHAHDQFKYSVVWLPVGPRWRSLRKALTANMFSSSRLDSGQKLRCRKVQELVDYCRSGEVVDVGRAAFRTSLNLLSSTIFCKDLTDPFSDSAKEFRDLVWNIMVEAGKPNLVDFFPILGKLDPQGVRRRTTVHFGELLYLFGGLIDERLEKGKSDQNADVMDVLLAAWKENPEEIDRTHIERMCLDLFIAGTDTSSSTVEWAMAEALANPEIMKKAKAELEEIVGKGKVLEEADISRLPYLRCMVKETLRLHPPVPFLIPRRVEDDVDVCGYTVPKNSQVLVNAWAIGRDAGIWENPLEFKPERFVGSEVDVKGRDFELIPFGGGRRICPGLPLAVRMVPMMVGSLLNSFDWKVEEEIIDMEEKFGITLQKARPLLAIPIPLF

SEQ ID NO: 305 - protein, 492 aa, Nepeta cataria; identical to SEQ ID NO: 264

SEQ ID NO: 306 - protein, 494 aa, Picrorhiza kurrooa; identical to SEQ ID NO: 281

SEQ ID NO: 307 - protein, 489 aa, Picrorhiza kurrooa
MDFLTIILGLLFAVTLIHGYQLLSSKGKRLPPGPTPLPLIGSLHLLGDQPHQSLAKLAKKHGELMCLRLGFINTIVISSAAMAKEVLQKQDLAFSSRMSPNAVHAHDQFKYSVVWLPVAARWRSLRKVLNSNIFSGNRLDANQHLRCRKVQELIAYCRKSSQTGAAVDMGRAAFRTSLNLLSNTIFSKDLTDPFSDSAKEFKELVWNIMLEAGKPNLVDFYPALEKLDPQGIRKRMTVHFGKVIELFSGLINERTETGKTQMLGTTDVIDVLSDSKETRRIDRTHIERLCLDLFVGGLTHINTLVWAMADHVRTRKYCKSRLTRTVIGKGKFSTKQNIQRLPYLRCMVKETLRIHPPVPFLIPRKVEQDVDVCGYTVPKNSQVFVNAWAIGRDPETWPNPLEFKPERFMESEVDMRGRDFELIPFGAGRRICPGVTLAVRMVPVMLGSLLNSFDWKLEGGAGPKDLDMEEKFGITLQKALPLMAVPIPL

SEQ ID NO: 308 - protein, 490 aa, Nepeta mussinii; identical to SEQ ID NO: 265

SEQ ID NO: 309 - protein, 494 aa, Olea europaea; identical to SEQ ID NO: 282

SEQ ID NO: 310 - protein, 494 aa, Sesamum indicum
MDFLTIVLGLLFTLVLVHGLQTLSARAKKLPPGPTPLPLIGSLHLLGDQPHQSLAKLAKTHGPLMCLRLGFINTVVVSSAAMAKEVLQKQDLVFSSRTIPDAIHAHDQFKYSVVWLPVASRWRSLRKVLNSNIFSGSRLDANQHLRCRKVQELIAYCRKNSQTGEPVDVGRAAFRTSLNLLSNTIFSKDLTDPFSDSAKEFKDLVWNIMVEAGKPNLVDFFPMLEKLDPQGIRRRMTIHFGKVIDLFSGLINERLEKGKTQNAGNSDVIDILLATSKENPEEIDRVHIERMCLDLFVAGTDTTSSTLEWAMAEALKNPETVKKAKAELEEVIGKGKVLDEADISRLPYLRCMVKETLRIHPPVPFLIPRRVDQDVEVCGYTVPKNSQVFVNAWAIGRDPDVWKDPLEFKPERFLESELDMRGRDFELIPFGAGRRICPGLPLAVRMVPVMLGSLLNSFDWKLENGIGPKELDMDEKFGITLQKARPLRAVPLPL

SEQ ID NO: 311 - protein, 493 aa, Coffea canephora
MDSLMVVLASLLSLTLIKGLSSLARRAKKHPPGPTPLPLIGNLHLLGDLPHQSLAKLAKIHGPVTSLKLGQLTTVVISSSSMAREVLQKKDLAFSSRSIPDAVHAQNHSHYSVVWLPVASRWRSLRRIMNSNMFSANSLDANQHLRCRKVQELVDCCQKNCQTGEAVDIGRAGFMTSLNLLSNTIFSKDLADPYSDTAKEFKDLVWDIMVEAGKPNPVDFFPLLKKFDPRGVRRRMSVHFEKVLKLFEGLINERLESGNSGDEGRDVLDELLTTSEESSQEFDRIDMVHMFLDLFVAGTDTTSSTLEWAMTELLKNPEKMRKAQAEIAGGIGKGKAIEEADVARLPYLQCIVKETLRIHPPVPFLIPRRVEQDVELCGYNVPKGSQVLVNAWAICRDEIVWENALVFKPERFLESEIDIRGRDFELIPFGAGRRICPGLPLAARVVPVMLGSLLNSFDWKLEGGNTPKDLDMEEKYGITLQKALPLRAVPLPL

SEQ ID NO: 312 - protein, 495 aa, Dorcoceras hygrometricum
MDWITIVVVLLSALTLSHGYRVLYSTWVKKHPPGPTPLPIIGNIHLLGNQPHKSLAKLAKTHGPLMRLRLGFINTVVISSSAMAKEVLQKQDLAFSSRWAPDALHACDHSNYSVVWLPVAARWRSLRKVLTSNIFSGSRLDANQHLSSRKVQELIAYCGSSSQTGEAVDVGRAAFRTSLNLLSNTIFSVDLADPFSDSGKEFKDLVCNIMVEAGKPNLVDYFPFLEKIDPQGIRRRMTFHFEKVIELFSCLIAERLEKGESKDSETNDVIDVLLATSKENPEEMDRTHIERLCLDMFVAGTDTTSNTLEWAMTEAIRNPEIMKKAKSELEEIVGKGKIISEEEVQRLPYLRCMVKETLRIHPPVPFLIPRKVEEDVQVCGYTVPRNSQILVNAWAIGRDGDAWKNPLEFKPERFLGSEIDVRGRDFELIPFGAGRRICPGLPLAIRMVPVILGSLLNSFDWKLEGGSSPDEVDVEEKFGITLQKAIPLRAVPIPL

SEQ ID NO: 313 - protein, 493 aa, Gentiana rigescens; identical to SEQ ID NO: 283

SEQ ID NO: 314 - protein, 493 aa, Vinca minor; identical to SEQ ID NO: 276

SEQ ID NO: 315 - protein, 493 aa, Ophiorrhiza pumila; identical to SEQ ID NO: 277

SEQ ID NO: 316 - protein, 493 aa, Rauvolfia serpentina; identical to SEQ ID NO: 278

SEQ ID NO: 317 - protein, 493 aa, Cinchona calisaya
MDYLTIVLGLLFALTLYQGLSSLSRKAKKLPPGPTPLPIIGNLHLLGDQPHKSLAKLAKKHGPLMSLKLGQITTVVVTSSDMAKEVLQKQDLAFSFRSIPDALHAHDQYRYSVVWLPVASRWRSLRKILNSNIFSGNRLDANQHLRLKKVQELVAYCRKNSQVGEAVDVGRAAFRTSLNLLSNTLFSKDLTDPYSDSAKEFKDLVWNIMLEAGKPNLVDFFPVLEKIDPQGIRRRMTIHFGKVLKLFGGLVDERLEQGKSKGGNSDVLDVLLTTSEEAPGEIDRTHIERMCLDLFVAGTDTTSNTLEWAMAEVLRNPEKMKKAKAELAEVIGKGKLVEEADVSRLPYLRCIVKETLRIHPPVPFLIPRRVDQDVEVCGYNVPKGSQVLVNAWAIGRDETVWENALAFKPERFWESELDIRGRDFELIPFGAGRRICPGLPLAVRMVPVMLGSLLNSFDWKLEAGIAPKGLDMEEKFGITLQKAYPLRAVPISL

SEQ ID NO: 318 - protein, 493 aa, Tabernaemontana elegans
MDYLTLVLGLLFALTFYQGLSYLSRKSKKLPPGPAPLPFIGNLHLLGDQPHKSLAKLSKKHGPLMSLKLGHITTVVISSSGMAKEVLQKQDLAFSSRSVPDALHAHNQFQFSVVWLPVASRWRSLRKILNSNIFSGNRLDANQHLRCRKVQELIAYCRKNCQTGEAVDVGRAAFRTSLNLLSNTIFSKDLTDPYSDSAKEFKDLVWNIMVEAGKPNLVDFFPVLEKVDPQGIRKRMTVHFGKVLKLFNGLINERLEQKRLQSGNNDVLDVLLTTSEESPEEIDRTHIERMCLDLFVAGTDTTSSTLEWAMAEMLKNPDKMQKTQAEIAEVIGKGKAIEEADVARLPYLRCVVKETLRIHPPVPFLIPRKVDQDVEVCGYKVPKGSQVLVNAWAIGRDGTVWEDPLAFKPERFFESEIDIRGRDFEVIPFGAGRRICPGLPLAARMVPVMLGSLLNSFNWKLEGGIAPKDLDMDEKFGITLQKAHPLRAVPSPL

SEQ ID NO: 319 - protein, 493 aa, Catharanthus roseus; identical to SEQ ID NO: 250

SEQ ID NO: 320 - protein, 493 aa, Catharanthus roseus; identical to SEQ ID NO: 250

SEQ ID NO: 321 - protein, 493 aa, Catharanthus roseus; identical to SEQ ID NO: 250

SEQ ID NO: 322 - protein, 493 aa, Catharanthus roseus; identical to SEQ ID NO: 250

SEQ ID NO: 323 - protein, 134 aa, Catharanthus roseus
MASDQKLHKFDEVSKHNKTKDCWLIINGKVYDVTPFMDDHPGGDEVLLSATGKDATNDFEDVGHSDSAREMMDKYYIGEMDMATVPLKRTYIPPQQAQYNPDKTPEFVIKILQFLVPLLILGLAFAVRHYTKEK

SEQ ID NO: 324 - protein, 110 aa, Yarrowia lipolytica
MIINGKVYDISSFVDEHPGGEEVLLDAGGTEATNAFDDVGHSEDAYGILNDLYVGEVDPSEDVIRKTHTVKTSYEDGESVGDDHGSSSMIFLIVAAAVAAAAFFYLQGQK

SEQ ID NO: 325 - protein, 138 aa, Nepeta cataria
MPTLTKLYTMEEASQHNTNEDCWIVIDGKVYDVSSYVDDHPGGDDILVGATGKDATDEFEDAGHSKSARELMEKFCIGELEETTPSIPELDIVSQKQKMNDLPHKILNFTKQYWFASITVAGLSVVVGYLCIRKKQTT

SEQ ID NO: 326 - protein, 134 aa, Catharanthus roseus; identical to SEQ ID NO: 323

SEQ ID NO: 327 - protein, 138 aa, Nepeta cataria; identical to SEQ ID NO: 325

SEQ ID NO: 328 - protein, 136 aa, Artemesia annua
MASDPKNFVFDDISKHNKTKDCWLIIDGKVYDVTPFMEDHPGGDEVLLAATGKDATDDFEDVGHSDDAREMMHKYYIGEVDKATVPKKRAYVPPADRHYNPDKTQDFIVKILQFLVPLVILGLAFAVRSYTKERSA

SEQ ID NO: 329 - protein, 134 aa, Arabidopsis thaliana
MSSDRKVLSFEEVSKHNKTKDCWLIISGKVYDVTPFMDDHPGGDEVLLSSTGKDATNDFEDVGHSDTARDMMDKYFIGEIDSSSVPATRTYVAPQQPAYNQDKTPEFIIKILQFLVPILILGLALVVRHYTKKD

SEQ ID NO: 330 - protein, 360 aa, Catharanthus roseus
MAKSPEVEHPVKAFGWAARDTSGHLSPFHFSRRATGEHDVQFKVLYCGICHSDLHMIKNEWGFTKYPIVPGHEIVGIVTEVGSKVEKFKVGDKVGVGCLVGSCRKCDMCTKDLENYCPGQILTYSATYTDGTTTYGGYSDLMVADEHFVIRWPENLPMDIGAPLLCAGITTYSPLRYFGLDKPGTHVGVVGLGGLGHVAVKFAKAFGAKVTVISTSESKKQEALEKLGADSFLVSRDPEQMKAAAASLDGIIDTVSAIHPIMPLLSILKSHGKLILVGAPEKPLELPSFPLIAGRKIIAGSAIGGLKETQEMIDFAAKHNVLPDVELVSMDYVNTAMERLLKADVKYRFVIDVANTLKSA

SEQ ID NO: 331 - protein, 378 aa, Catharanthus roseus
MTKTNSPAPSVITCKAAVVWKSGEPPKVEEIQVDPPKASEVRIKMLCASLCHTDFLACNGLPVPLFPRIPGHEGVGMIESVGENVTNLKEGDIVMPLYLGECGECLNCKSGRTNLCHKYPLGFSGLLLDGTSRMSIGEQKVYHHFSCSTWSEYIVIEAAYAVKVDPRVSLPHASFLCCGFTTGFGATWRDVNVVKGSTVAVLGLGAVGLGAVQGAKSQGASRIIGLDINDKKREKGEAFGMTEFINPKGSNKSISELINEATGGLGLDYVYECTGVPALLNEAIESSKVGLGTAVLIGAGLETSGEIKFIPLLCGRTVKGSIYGGVRPKSDLPTLIEKCINKEIPMDELMTHEVSLSEINKGFEYLKHPDCVKVVIKF

SEQ ID NO: 332 - protein, 376 aa, Nepeta cataria
MADNTNPGVITCKAAVAWKPLEPLKVEEIQIQPPKPTEVRIKMLYASICHTDTVCWTGILYDMFPRVLGHEGVGVIESVGEEVTDLKVGDTVMPLYVGECGKCPNCASGKSNFCSNYPLTLGLMADGTTRMSAKGQQLYQLFSCSTWSEYAVIESNYVVKVDPKLSLSGASLLTCGFTTGYGAVWKVVNFEKGSTVAVVGLGAVGFGAVKAAQILGASKIIGVDINETRRDKAKALGVTDFINPKSSDKTMSQLIQEATGGLGVDCCIECTGVPSLLNEAIASTKVGSGEVVLISAGDEQNTELNYVPLLLGRTVKGTIYGGVRIHSDLHKIVDKCISKEIDLDEIITHEVSLADVNKGFLEYMKQPDCVKVIIKF

SEQ ID NO: 333 - protein, 377 aa, Sesamum indicum
MANTSSTSPVITCKAAVIRKPGEPLQVEEIQVDPPKPTEVRIKMLCASMCHTDILCCNGFPAPLFPRIPGHEGVGVVESVGDEVTHVKVGDTVMPLYLGECGECQNCSSGRTNLCHKYPLDFSGLMADGTSRMSVGGEKIYHVFSCSTWSEYIVLESYYAVKVDPRLSLPHASFLSCGFTTGFGSTWREVNVKKGSTVAVIGLGAVGLGAVKGAQIQGAAKIIGIDINELKQEKAKAFGITEFINPKLSDRSVSELIKEATGGLGVDYCIECTGVPALLNEAIEGSKVGLGTVVLIGAGLEKSVELNYIPLLCGRTVRGSIYGGVRAQSDLPKIVEKCVNKEIDLDHLITHEVSLAEINKAFEYMKHPDCVKVVIKF

SEQ ID NO: 334 - protein, 375 aa, Camptotheca acuminata
MSKTSSQVITCKAAVSWGAGLPLKVEEIQVEPPKSSEVRLKMLCASLCHTDILCCNGLPVPLFPRVPGHEGVGMVESVGEGITGLKEGDIVMPTYIGECGKCENCMSGKSNLCLAYPLPFSGLMPDGTSRMSINGQKLYHFFSCSTWSEYIVIDSNYVVKLDPRISHSHASFISCGFSTGFGATWKEVNVEKGSSVAVFGLGAVGLGVVEGARMQGASKIIGVDINEKKRVKGQVFGLTDFINPSGSDKSISDLIKDLTGGTGVDYCFECTGVATLVNEALEATKVGIGTSVLIGAGLQQSGMINFVPLLCGRTLKGSIYGGVKIQSDLPIIFEKCINKEINLDELLTHEVSLDEINKAFQLLKQPDCVKVLIKI

SEQ ID NO: 335 - protein, 377 aa, Sesamum indicum
MTDGTTTPPVITCKAAVLRKSGEPLQVEEIQVDPPKSTEVRIKMLCASMCHTDILCCNGLPVPLFPRIPGHEGVGVVESVGDQVTHVKVGDTVMPLYLGECGECLNCSSGRTNLCHKYPLGFSGLMADGTSRMSVGGEKIYHHFSCSTWSEYVVIEANYAVKVDPRVSLPHASFLCCGFTTGFGSTWREVNIEKGSTVAVIGLGAVGLGAVKGAQMLGASKVIGIDINELKHEKAKAFGITEFINPKLSDKSVSELIKEATGGLGVDYCFECTGVPALLNEAIEGSKVGLGTIVFIGAGLEKSGELNYIPLLCGRTVRGSIYGGVRTQSDLPKIVEKCVNKEIDLDQLITHEVSLAEINKGFEYMKQPDSLKVVIKF

SEQ ID NO: 336 - protein, 375 aa, Swertia japonica
MTISSPAVVTCKAAVIWKSGEPAKVEEIQVDPPKAGEIRVKMLYASLCHTDVLCCNGLPVPLFPRIPGHEGVGTVESIGENVTNVKEGDIVMPLYLGECGECLNCKSGRSNLCHKYPLGFSGLLLDGTSRMSIKGETVYHHFSCSTWSEYIVIEAAYAFKVDPKMSLPHASFLCCGFTTGFGAAWREVCVEKGSTVAVLGLGAVGLGVVEAARVQGASRIIGLDINDKKREKGEAFGITEFINPTGSEKSVSQLILEATGGLGVDYCYECTGVPALLNESIEASKVGLGTAVLIGAGFETSGVINFIPLLCGRTLKGSIYGGIRPNSDLPAIVDKCISKEINLDELLTHEVSLSEINKAFEYLKDPDCVKVVIKF

SEQ ID NO: 337 - protein, 375 aa, Ophiorrhiza pumila
MTKRSPSVITCKAAVIWKSGEAAKVEEIQVEPPKSSEVRIKMLCASLCHTDILCCNGLPVPLFPRIPGHEGVGMVESVGENVTNLKEGDIVMPLYLGECGECLNCQSGKTNLCHKYPLGFSGLLLDGTSRMSIGGQTVYHHFSCSTWSEYIVIEAPYAVKIDPRLSLPHASFLCCGFTTGFGATWREVNVVKGSTVAVLGLGAVGLGVVEGARMQGASRIIGIDINDMKREKGEAFGMTEFINPKHSEKSISELIKDVTGGLGVDYCYECTGVPALLNEAIDASKVGLGTAVLIGAGLETSGQINYIPLLCGRVLKGSIYGGVRPLSDLPTIIDKCINKEIPLDELMTHEVSLDEINKGFEYLKQPDCVKVVIKF

SEQ ID NO: 338 - protein, 375 aa, Cinchona ledgeriana
MTKSSQGVITCKAAVIWKSGEPPKVEEIQVDPPKASEVRIKMLCASLCHTDILCCNGLPVPLFPRIPGHEGVGMVESVGENVTNLKEGDIVMPLYLGECGECLNCKSGRSNLCHKYPLGFSGLLLDGTSRMSTGGQTIYHHFSCSTWSEYIVIEAAYAAKVDPRISFPHASFLCCGFTTGFGATWREVTVEKGSTVAVLGLGAVGLGAVAGARTQGATRIIGVDINDMKREKGEAFGITEFINPKDSDKSISELIKDATGGLGVDYCYECTGVPALLNEAIDASKVGLGTIVLIGAGLKTSGEINYIPLLCGRTLKGSIYGGVRPQSDLPSIVDKCINKEIQLDELITHEVSLHEINRGFEYLKQPDCVKVVIKF

SEQ ID NO: 339 - protein, 378 aa, Lonicera japonica
MTKSSSEVITCKAAVIWKSGEPAKVEEIKVDPPKSSEVRIKMLCASLCHTDILCCNGLPVPLFPRIPGHEGVGMVESVGEKVTDVKEGDIVMPLYLGECGECLNCKSEKTNLCHKYPLDFSGVLPSDGTSRMSIAKSGEKIFHHFSCSTWSEYVVIESSYVVKVDPRLPLAHASFLACGFTTGFGAAWREANVHKGSTVAVLGLGAVGLGVVSGAKVQGASKIIAVDINDMKREKGESFGMTDFLNPKESGKSASELIKEATGGLGVDYCFECTGVPAMLNEAIDASKVGLGTIVLIGAGMETSGVINYIPLLCGRTLKGSIYGGVRIQSDLPVIIEKCINKEIQLDELQTHEVSLEEINEAFGLLKHPDCVKVVIKF

SEQ ID NO: 340 - protein, 375 aa, Coffea canephora
MTKSTPSVVTCKAAVVWKSGEPPKIEEIQVDPPKASEVRVKMLLASLCHTDILCCHGLPVPLFPRIPGHEGVGMVESVGENVTNLKEGDIVMPLYLAECGECLNCISGKTNLCHKYPLGFSGLLLDGTSRMSIRGQAIYHHFSCSTWSEYIVIEAPYAVKVDPRVSLPHASFLCCGFTTGFGAAWREITVEKGSTVAVLGLGAVGLGVAGGARMQGASRIIGVDRNEMKREKGEAFGMTEFINPKGSDKSISDLIKEVTGGLGVDYCFECTGVPDLLNEAIEASKIGLGTSVLIGAGFETSGDFKYIPLICGRTLKGSIYGGVRPKSDLPLLLEKCANKEIPLDELITHEVTLDEINRGFEYLKHPDCVKVVVKF

SEQ ID NO: 341 - protein, 375 aa, Rauvolfia serpentina
MTKSTPTVITCKAAVLWKAGEPPKIAEIQVDPPKAPEVRVKMLCASLCHTDFLCCNGLPVPLFPRIPGHEGVGMIESVGENVRDLKEGDIVMPLYLGECGECLNCKSGRSNLCHKYPLGFSGLLLDGTSRMSIGGQKVYHHFSCSTWSEYIVTEAAYAVKVDPRVSLPHASFLCCGFTTGFGATWREINVEKGSTVAVLGLGAVGLGAVQGARSQGASRIIGVDINDKKRKKGEAFGITEFINPKGSNKSVSQLIKDATGGLGVDYVYECTGVPALLNEAIEASKVGLGTSVLIGAGLETSGEIKFIPLLCGRTVKGSIYGGVRPKSDLPTIIDKCINKEIPMDELLTHEVSLSEINKAFEYLKQPDCVKVVIKF

SEQ ID NO: 342 - protein, 376 aa, Gentiana rigescens
MTKTITPAVITCKAAVIWKSGEPAKVEEIQVEPPKTGEVRVQMLYASLCHTDVLCCNGLPVPLFPRIPGHEGVGVVESVGENVTNLKEGDIVMPLYLGECGECLNCKSGKSNLCHKYPLGFSGLLLDGTSRMSIKGQTVYHHFSCSTWSEYIVIEAAYAFKVDPKISLPHASFLCCGFTTGFGAAWREVVIEKGSTVAVLGLGAVGLGVVEAARIQGASRIIGLDINDKKREKGEAFGLTEFINPSGSDKSVSQLINGVTGGLGVDYCYECTGVPALLNEAIESSKVGLGTVVLIGAGFETSGTINFIPLLCGRTVKGSIYGGVRPNSDLPAIIAKCVNKEINLDELLTHEVALSDINKGFEYLHDPDCVKVVIKF

SEQ ID NO: 343 - protein, 378 aa, Catharanthus roseus; identical to SEQ ID NO: 331

SEQ ID NO: 344 - protein, 376 aa, Nepeta cataria; identical to SEQ ID NO: 332

SEQ ID NO: 345 - protein, 376 aa, Ocimum basilicum
MANNTNAGVITCKAAAAWKPSEPLVVEEICVEPPKSTEVRIKMLAASMCHTDILLWKGFFPLYPRIPGHEGAGVIESVGEKVANLKVGDTVMPLSIGQCGECSNCATGKTNICFKYPFGISGLMPDGTSRMSAKGQKLYHMFTCSTWSEYTVVDSNFVVKVDPRIPLPHASLLTCGFLTGYGAPWRESRVEKGSTVAVIGLGAVGLGAVSASRILGASKIIGIDVNELKREKATVFGVTEFINPKHSDKTVSQLIQEATGGLGVDCCIECTGVSSLLNEAIASTKVGIGEVVLIGAGEKEKVEISYIPLMLGRSVKGTTLGGVRIHSDLPKIVEKCINKEIDLDELITHEVSLVDVNKGFMEYMNQPDCVKVSVKF

SEQ ID NO: 346 - protein, 377 aa, Sesamum indicum; identical to SEQ ID NO: 333

SEQ ID NO: 347 - protein, 377 aa, Capsicum annuum
MESSNPKVITCKAAVAWKEGESLKMEEIQVDPPKSSEIRIKMLFASLCHTDILCSNGFPVPLFPRVLGHEGVGMIESVGENVTKLKEGDIVMTLYLGECNECPNCKSGRSNLCHKYPMRLSGLMLDGTSRMSIRGGQILYHGLSCSTWSEYAVINANYAVKVDPQQVPLPHTSLLCCGFTTGYGAAWREVCIEKGSTVAVLGLGAVGLGVVEGARSQGAGKIIGVDINNLRRGKGEAFGTTDFINPKEHEASISDMIKGITGGLGVDYVFECTGIPSMLNEAIEASKMGIGTIVVIGAGNGTSREFNLIPLMCGRTMKGSIYGGMRIHSDLPALLHRCANKEIQLDELITHQVSFTEINQLFELLKDPHCLKIIIKF

SEQ ID NO: 348 - protein, 375 aa, Camptotheca acuminata; identical to SEQ ID NO: 334

SEQ ID NO: 349 - protein, 384 aa, Solanum tuberosum
MSPSKLTMESSNRKVITCKAAVVWKEGEMIKIEDIQVDPPKSNEVRIKMLFASLCHTDILTTNGFPYPLFPRVLGHEGVGMIESVGENVTNLKEGDIVMPLYLGECKECPNCKSGKSNLCHKYHLTFSGLMLDDTSRMSIHGGQVLYHSFSCSTWSEYTVINANYVIKVDPKKIPLQHASLLCCGFTTGYGATWREVHVEKGSTVAVLGLGVVGLGAIEGARSQGASKIIGVDINESKRGKGELFGMTDFINPKESRTSVSEMIKDVTEGLGVDYVFECTGIPSMLNEAIEASKLGIGTIVVIGAGHGLTREFNLVPLLCGRTLKGSIYGGIRLHSDLPAILHRCATKEIQLNDLITHQISLTEINQSFELLKDPHCVKIIIKF

SEQ ID NO: 350 - protein, 377 aa, Sesamum indicum; identical to SEQ ID NO: 335

SEQ ID NO: 351 - protein, 375 aa, Swertia japonica; identical to SEQ ID NO: 336

SEQ ID NO: 352 - protein, 375 aa, Ophiorrhiza pumila; identical to SEQ ID NO: 337

SEQ ID NO: 353 - protein, 375 aa, Cinchona ledgeriana; identical to SEQ ID NO: 338

SEQ ID NO: 354 - protein, 378 aa, Lonicera japonica; identical to SEQ ID NO: 339

SEQ ID NO: 355 - protein, 375 aa, Coffea canephora; identical to SEQ ID NO: 340

SEQ ID NO: 356 - protein, 375 aa, Rauvolfia serpentina; identical to SEQ ID NO: 341

SEQ ID NO: 357 - protein, 376 aa, Gentiana rigescens; identical to SEQ ID NO: 342

SEQ ID NO: 358 - protein, 378 aa, Catharanthus roseus; identical to SEQ ID NO: 331

SEQ ID NO: 359 - protein, 375 aa, Olea europaea
MTNRNPEVIKCKAAVVWKAGEPLKVEEIQVDPPKSSEVRIKMLCASLCHTDFLCCNGHPVPLFPRIPGHEGVGMIESVGGGVTNLKEGDRVMPLYLGECGECLNCKSGKTNLCHKYPFNFTGLMPDGTSRMHIGDQIIYHHFSCGTWSEYVVIDANFAVKVDPRVPLAHASFLCCGFTTGFGSAWRAVTIEKGSTVAVIGVGAVGLGVMEAARMQGASRIIGIDKNNFKKKKGEAFGMTEFINPKESDKPVSELIKDATNGLGVDYFYECTGVPALLNEAIEGSKVGLGTIVLIGSGLDLSGELKYIPLLCGRTLKGSTYGGVRPQSDLPIIVEKCINKEIQLDELETHEVSLEEINKAWEYLKQPNCVKIVINY

SEQ ID NO: 360 - protein, 378 aa, Sesamum indicum
MTNTNTTPAVITCKAAVIRKSWEPLQVEEIQVDPPKSGEVRIKMLCASMCHTDMTCCNSGFPVPFFPRIPGHEGVGVVESVGEQVTNLKVGDIVMTLYLGECGECLNCSSGRTNLCHKYPLGFDGLMPDGTSRLSVGGERTYHLVSCSTWSEYAVIDANYTVKVDPRLSPPHASFLCCGFTTGFGSSWREVNIEKGSTVAVIGLGAVGLGAAKGAQLQGASKIIGIDINELKKEKAKAFGITDFINPKLSDKSVSELIKEATGGLGVDYCFECSGVPALVNEAIEGSKMGLGTIMVLGVGPGKSVEVDYIPLLCGRTLRGSTYGGVRTQSDLPKIIEKCVNKEIDLDQLITHEVSLAEINKGLEYMKQPNCVKVVIKF

SEQ ID NO: 361 - protein, 375 aa, Olea europaea
MTRGNPGVITCKAAVVWKSGDPLKIEEIQVDPPKTSEVRIKMLCASLCHTDFLCRNGLPVPLFPRIPGHEGVGMIESVGEGITNLKEGDVVMPLYLGECGECLNCKSGKTNLCHKYPLNFTGLMPDGTSRMHIGDQIIYHHFSCGTWSEYVVIDANFAVKVDPRVSLAHASFLCCGFTTGFGSAWREVTIEKGSTVAVIGVGAVGLGVIEAARMNGASRIIGIDINNLKKKKGEVFGMTEFINPKESDKPVSELIKETTGGLGVDYCYECTGVAELLNEAIEGSKVGLGTIVFIGAGLHLSGELKYIPLLCGRTIKGSIYGGVRPQTDLPKIVEKCINKEIQLDELLTHEVSLEEINKAWEYLKQPSCVKVVIKY

SEQ ID NO: 362 - protein, 384 aa, Erythranthe guttata
MTSRGVMTCRAAVVRKCREALEVEEIEVDPPKSSEVRIKMLCASICHTDILCWQGVPLVLSTMNTLITSPMFPRIPGHEGVGVIESVGENVTNLKVGDTVMPLYLGECGECSNCISGITNLCHKYPFNFNGLMADGTSRMSVKGERLYHHFSCSTWSEYAVIDANYAVKVDPRISLPHASFLCCGFTTGFGSTSRVVNIHKGSTVAVIGLGAVGLGAVKGAQMLGASKIIGIDINEKKHDKARFFGITEFINPEVSGKSVSELIKEATGELGVDYCFECTGVPALLNEAIEGSKVGTGTVVFIGAGVEKSGELNYIPLLCGRTVKGSIYGGVRTHTDLPSIVDKCVNKEIDLDQLITHEISLAEINKGFQYMKDPNCIKVVIKF

SEQ ID NO: 363 - protein, 360 aa, Catharanthus roseus; identical to SEQ ID NO: 330

SEQ ID NO: 364 - protein, 376 aa, Ocimum basilicum; identical to SEQ ID NO: 345

SEQ ID NO: 365 - protein, 375 aa, Camptotheca acuminata; identical to SEQ ID NO: 334

SEQ ID NO: 366 - protein, 375 aa, Swertia japonica; identical to SEQ ID NO: 336

SEQ ID NO: 367 - protein, 375 aa, Cinchona ledgeriana; identical to SEQ ID NO: 338

SEQ ID NO: 368 - protein, 375 aa, Rauvolfia serpentina; identical to SEQ ID NO: 341

SEQ ID NO: 369 - protein, 388 aa, Arabidopsis thaliana
MSWWWAGAIGAAKKKLDEDEPSQSFESVALIIGVTGIVGNSLAEILPLSDTPGGPWKVYGVARRPRPTWNADHPIDYIQCDVSDAEDTRSKLSPLTDVTHVFYVTWTNRESESENCEANGSMLRNVLQAIIPYAPNLRHVCLQTGTKHYLGPFTNVDGPRHDPPFTEDMPRLQIQNFYYTQEDILFEEIKKIETVTWSIHRPNMIFGFSPYSLMNIVGTLCVYAAICKHEGSPLLFPGSKKAWEGFMTASDADLIAEQQIWAAVDPYAKNEAFNCNNADIFKWKHLWKILAEQFGIEEYGFEEGKNLGLVEMMKGKERVWEEMVKENQLQEKKLEEVGVWWFADVILGVEGMIDSMNKSKEYGFLGFRNSNNSFISWIDKYKAFKIVP

SEQ ID NO: 370 - protein, 389 aa, Digitalis lanata
MSWWWAGAIGAAKKRLEEDDAQPKHSSVALIVGVTGIIGNSLAEILPLADTPGGPWKVYGVARRTRPAWHEDNPINYVQCDISDPDDSQAKLSPLTDVTHVFYVTWANRSTEQENCEANSKMFRNVLDAVIPNCPNLKHISLQTGRKHYMGPFESYGKIESHDPPYTEDLPRLKYMNFYYDLEDIMLEEVEKKEGLTWSVHRPGNIFGFSPYSMMNLVGTLCVYAAICKHEGKVLRFTGCKAAWDGYSDCSDADLIAEHHIWAAVDPYAKNEAFNVSNGDVFKWKHFWKVLAEQFGVGCGEYEEGVDLKLQDLMKGKEPVWEEIVRENGLTPTKLKDVGIWWFGDVILGNECFLDSMNKSKEHGFLGFRNSKNAFISWIDKAKAYKIVP

SEQ ID NO: 371 - protein, 396 aa, Nepeta mussinii
MSLSWWRAGAAKKRMDDDESLLVKQQQQQCVALIVGVTGLVGNSLAEMLPLPDTPGGPWKVYGVARRARPSWNEDQPMTYISCDVSNTGEVEAKLSPLSDVTHIFYATWTSRSTEEENCEANGKMLKNVLDAMIPNCPNLKHICLQTGRFHYVASVVDWKINGSHDTPLTEDLPRLKTNNFYYTQEDILLEEVKRKEGLTWSVHRPGTIFGFSPYSMMNLVGTLCVYAAICKQEGAVLRFPGCKGAWDGHSDCADADLIAEQQIWAALDPHAKNQAFNVSNGDLFKWKHLWKVLADQFGVECGDYEEGQQLRLQDVMKDKGPVWDKIVAENGLSNTKLEDVGKWWFSDTILWNECRLDSMNKSKEHGFLGFRNSKNCFLYWIHKVKAYNLVPSTYT

SEQ ID NO: 372 - protein, 397 aa, Nepeta cataria
MSMNWWRDGAAKKRMDESSAVKLQQQQCVALIVGVTGLVGNSLAEMLPLSDTPGGPWKVYGVARRPRPSWNEDHPINYISCDVSNTAEVEAKLPPLSDVTHIFYATWTSRSSEEENCEANGKMLKNVLDTMIPNCPNLKHICLQTGRFHYVASVVDWKINGSHDTPLTEDLPRLNTNNFYYTQEDILLEEVKRKEGLTWSVHRPGTIFGFSPYSMMNLVGTLCVYAAICKQEGAVLRFPGCKGAWDGYSDCADADLIAEHYIWAALDPHAKNQSFNVSNGDVFKWKHLWKVLAEQFGVECGGYEYEEGQQVRLQDVMKDKGPVWDKIVRENGLSNTKLEDVGKWWFSDTILWNECRLDSMNKSKEHGFLGFRNSKNCFLYWIHKLKAYKIVPSSTIS

SEQ ID NO: 373 - protein, 388 aa, Catharanthus roseus
MSWWWKRSIGAGKNLPNQNKENGVCKSYKSVALVVGVTGIVGSSLAEVLKLPDTPGGPWKVYGVARRPCPVWLAKKPVEYIQCDVSDNQETISKLSPLKDITHIFYVSWIGSEDCQTNATMFKNILNSVIPNASNLQHVCLQTGIKHYFGIFEEGSKVVPHDSPFTEDLPRLNVPNFYHDLEDILYEETGKNNLTWSVHRPALVFGFSPCSMMNIVSTLCVYATICKHENKALVYPGSKNSWNCYADAVDADLVAEHEIWAAVDPKAKNQVLNCNNGDVFKWKHIWKKLAEEFGIEMVGYVEGKEQVSLAELMKDKDQVWDEIVKKNNLVPTKLKEIAAFWFADIAFCSENLISSMNKSKELGFLGFRNSMKSFVSCIDKMRDYRFIP

SEQ ID NO: 374 - protein, 388 aa, Catharanthus roseus; identical to SEQ ID NO: 373

SEQ ID NO: 375 - protein, 396 aa, Nepeta mussinii; identical to SEQ ID NO: 371

SEQ ID NO: 376 - protein, 397 aa, Nepeta cataria; identical to SEQ ID NO: 372

SEQ ID NO: 377 - protein, 392 aa, Olea europaea
MSWWFNRSVNGCKQKKIQENGVQQQQNGDIQSFKSVALIVGVTGIVGSSLSEILQYTDTPGGPWKVYGVARRPRPTWLAKSHVEYVQCDVTNTEETISKISPLTDITHIFYVSWMGNEDCSMNAVMFQNILNSVIPNAPNLQHICLQTGSKHYIGLFETDTPESHDTPYSEDLARLKQPNFYHNLEDILFEETAKKGLTWSVHRPALIFGFSPCSLMNIVSTLSVYAAICKHENKPLVYPGSKASWNCFVDAADAELAAEHQIWAAVDPNAKNQAFNCTNGDLFKWKHIWKVLANQFDLEMVGYIEGNEQVSMEELMKDKDSVWDEIVKKNNLMPTKLKEIAAFWFADIAFCLENVLSSTHKNRLHGFMGFRNTYTSFVSCIDKMRAYRFIP

SEQ ID NO: 378 - protein, 367 aa, Catharanthus roseus
MGVCKSYKSVALVVGVTGIVGSSLAEVLKLPDTPGGPWKVYGVARRPCPVWLAKKPVEYIQCDVSDNQETISKLSPLKDITHIFYVSWIGSEDCQTNATMFKNILNSVIPNASNLQHVCLQTGIKHYFGIFEEGSKVVPHDSPFTEDLPRLNVPNFYHDLEDILYEETGKNNLTWSVHRPALVFGFSPCSMMNIVSTLCVYATICKHENKALVYPGSKNSWNCYADAVDADLVAEHEIWAAVDPKAKNQVLNCNNGDVFKWKHIWKKLAEEFGIEMVGYVEGKEQVSLAELMKDKDQVWDEIVKKNNLVPTKLKEIAAFWFADIAFCSENLISSMNKSKELGFLGFRNSMKSFVSCIDKMRDYRFIP

SEQ ID NO: 379 - protein, 370 aa, Nepeta mussinii
MQQCVALIVGVTGLVGNSLAEMLPLPDTPGGPWKVYGVARRARPSWNEDQPMTYISCDVSNTGEVEAKLSPLSDVTHIFYATWTSRSTEEENCEANGKMLKNVLDAMIPNCPNLKHICLQTGRFHYVASVVDWKINGSHDTPLTEDLPRLKTNNFYYTQEDILLEEVKRKEGLTWSVHRPGTIFGFSPYSMMNLVGTLCVYAAICKQEGAVLRFPGCKGAWDGHSDCADADLIAEQQIWAALDPHAKNQAFNVSNGDLFKWKHLWKVLADQFGVECGDYEEGQQLRLQDVMKDKGPVWDKIVAENGLSNTKLEDVGKWWFSDTILWNECRLDSMNKSKEHGFLGFRNSKNCFLYWIHKVKAYNLVPSTYT

SEQ ID NO: 380 - protein, 373 aa, Nepeta cataria
MQQCVALIVGVTGLVGNSLAEMLPLSDTPGGPWKVYGVARRPRPSWNEDHPINYISCDVSNTAEVEAKLPPLSDVTHIFYATWTSRSSEEENCEANGKMLKNVLDTMIPNCPNLKHICLQTGRFHYVASVVDWKINGSHDTPLTEDLPRLNTNNFYYTQEDILLEEVKRKEGLTWSVHRPGTIFGFSPYSMMNLVGTLCVYAAICKQEGAVLRFPGCKGAWDGYSDCADADLIAEHYIWAALDPHAKNQSFNVSNGDVFKWKHLWKVLAEQFGVECGGYEYEEGQQVRLQDVMKDKGPVWDKIVRENGLSNTKLEDVGKWWFSDTILWNECRLDSMNKSKEHGFLGFRNSKNCFLYWIHKLKAYKIVPSSTIS

SEQ ID NO: 381 - protein, 331 aa, Nicotiana tabacum
MGLGPYTVYFDALCIGLGAILMQDSRMIAYASYQLNTHEKNYHVHDLELASIVHTLNIWGALIVRRVMGVTKKYSDLKQHYLWRKMEKDIIGHVSQCLNCQQVKYQKLGGLTQRLTKSVHFIPVITSYTSERKPSITWSVHRPDMIFGFSPHSTLNIVGTLCVYTTICKYEGIPLKFPGTKARWDSYSNASDADLVAEHEIWAALCPRAQNKAFNITNGDVFKWKHLWKVLAEQIGVEYVGFDETEKRICLAEMMKDKGHVWDKIVRDNNLVSTTLEEVGLWQFADMILAGGSNRLSSINRSKEHGFMGFRNSTNSFIFWIQKAKDNRLIP

SEQ ID NO: 382 - protein, 400 aa, Elaeis guineensis
MSWWWAGAIGAARKKFDEDSGGGGAAAKFPSVGLVIGVTGIVGNSLAEILPLADTPGGPWKVYGVSRRPHPSSLASQTEGLAIEHVQCDISDREDALAKLSPLTDVTHIFYVAWVNRSTEAENREINSAMLRNVLTAVIPNAPNLQHVCLQTGRKHYLGSFESLGKVKGHEPPFVEDLPRLDCPNFYYDLEDILFEEVAKREGAVTWSIHRPTNIFGFSPSSLMNLMGILCVYAAICRREGVPLRWPGSRVLWEGFSDASDADLIAEHQIWAAVDPYAKNEAFNCSNGDVFKWKHLWPLLAKEFGVEWVGYQGEEARFKLEDAMKGKEGLWEKMVAEHELAPTRLEQVGNWWFADVVLGLEEEYLDSMNKSKEHGFLGFRNTVTSFNSWIDKIKAYKIVP

SEQ ID NO: 383 - protein, 400 aa, Citrus clementina
MSWWWAGAIGAARKKFEEDEPARSYQSVALIVGVTGIVGNSLAEILPLPDTPGGPWKVYGVARRPKPNWNADHLVEYVQCDVSDPEETQAKLSQLTDVTHIFYVTWTNRSTEAENCKINGSMFRNVLRAVIPNAPNLRHVCLQTGTKHYLGPFEAFGKIKPYDPPFTEDMPRLDAPNFYYTLEDILFEEVEKKEELSWSVHRPDTIFGFSPYSLMNLVGALCVYAAVCKHEGIPLRFPGTKAAWECYSIASDADLIAEHQIWAAVDPYAKNEAFNCNNGDVFKWKHLWKVLAEQFGIEDYGLSEEEEEEEEGGGGTQRVKLAEFMKGKEGVWEEIVRENQLQPTRLDEVGAWWFVDLVLTGEAKLASMNKSKEHGFSGFRNSKNSFITWIDKAKGYKIVP

SEQ ID NO: 384 - protein, 391 aa, Sesamum indicum
MSWWWAGAVGAAKQKKLEEDEAPQKHESVALIIGVTGLVGNSLAEILPLSDTPGGPWKVYGVARRPRPSWSDDYPINYIQCDVLNRDDTQAKLSTLTDITHVFYATWTNRPTEAENCEANGRMLQNVLDAVIPNCPNLKHICMQTGRKHYVGPFEAFGKLETQLETPYTEDMPRLNYINFYYTLEDILCKEVEKKEGLTWSVHRPGTIFGFSPHSMMNLVGTLCAYAAICKHEGKVLRFPGCKEAWDGYSDCSDADLIAEHQIWAAVDPHAKNEAFNVNNGDVYKWKHLWKVLAEQFGVECGEHEEGQTITFEGLMKDKGGVWDEMVRENGLTPTKLEDVGLWWFADVILGNKCFLDTMNKSKEHGFLGFRNSKKSFISWIEKVKANKIVP

SEQ ID NO: 385 - protein, 389 aa, Camptotheca acuminata
MSWWWARSLGAQKEFKENGALTSYQSVGLIIGVTGIVGNSLAEILPLPDTPGGPWKVYGVARRPRPAWNTDHPIEYIQCDVASTEDTLAKLSPLTNITHIFYVAWTGSEDCEVNETMFHNVLKAVIPNAPNLRHICIQTGIKHYTGPLDPDGGIQPHDSPFTEDLPRLNAPNFYHNLEDILIEEAAKKKGLTWSVHRPALVFGFSPYSMMNIIGALSVYAVICKHENKPLIYHGAPDNSRDSWNVYADAADADLIAEHQIWAAVDSNAKNEVFNCSNGDVFKWKQMWKILAEQFEVELVGYEDGQKRMSLQERMKGKGPVWDEIVRKHKLLPTKLEDVAQWWFADIVSQSQNLVNGVNKSKENGFLGFRDSKKSFVYWIKKMRAAKIIP

SEQ ID NO: 386 - protein, 391 aa, Cinchona pubescens
MSWWWKRSIDAGKNSGKKLEVNENEAIVEDYKSVALVVGVTGIVGSSLAQVLALPGTPGGPWKVYGVARRSRPVWFSKNHLEYIQCDVSNTQETISKLSPLTDITHIFYVSWIGSEDCDINATMFKNILNTVIPNAPKLQHICLQTGIKHYFGIFEEGSKVEPHDSPFTEDLPRLDVPNFYHDLEDILYEETSKNNLTWSVHRPALVFGFSPCSLMNIASTLCVYATICKYENKPLVYTGSKASWNCYSDAVDADLIAEHQIWAAVDPKAKNQVLNCNNGDVFKWKHVWKTLAEQFGLEMVGYIEGKQQVSLAELMKDKDLVWDEIVKKHNLAPTKLKDIAAFWFADIAFCSENFLSSMNKNKELGFLGFRDSIKSFNSCIDKMRAYRFIP

SEQ ID NO: 387 - protein, 393 aa, Ophiorrhiza pumila
MSWWWKRSIGEGQNSAKTSEEINGLNGEDDQDYKSVGLVVGVTGIVGSSLAQVLTLSDTPNGPWKVYGVARRRRPDWFSKQHLHYIQCDVSNTQETISKLSPLTDITHIFYVSWVGSEDCDTNATMFKNIVNIVIPNAPNLKHISLQTGSKHYFGIFEEGSKVKPNESPFKEDMPRLDVKNFYHDLEDILYEETSKNGLTWSVHRPALVYGFSPCSMMNIVSTLSVYATICKHENRPLTYPGSKASWNCYVDCVDADLIAEHHIWAAVDPKAKNQILNCTNGDVFKWKHIWKALAEEFGLEMVGYIEGKEQVSMAELMKDKDLVWDEIVKKNNLVPTKLNDIAAFWFADIAFSCVDLLSSMTKSKELGFLGFRDTMKSFSSCIDKMRAYRFIP

SEQ ID NO: 388 - protein, 406 aa, Lonicera japonica
MSWWWTRSIGGEKGSSYGKIAEQNGVQANGNSHLHKKEENGGPATYKSVALIVGVTGIVGSSLAEILPLQNTPGGPWKVYGVARRPRPSWTDKSPINYIQCDVSNTIETVAKLSPLTDITHIFYVSWMGSEDCEINAIMFQNILDAVIPNAPNLKHISLQTGIKHYMGVFETDTKQKPHDSPYTEDLPRLNVQNFYHNLEDILYEETAKKGLTWSVHRPALVFGFSPCSMMNIVSTLSVYAAICKHENKPLVYPGSKGSWDCYADAVDADLIAEHHIWAAVDPKAKNEIFNCNNGDVFKWKHIWKALAEKFELEMVGYEEGKEQVSMAEMMKDKEEVWDEIVRENKLVPTKLKDIAAWWFADIAFVTQNVLSSMNKNKEHGFEGFRNSTKSFVSCIDKMKAYRIIP

SEQ ID NO: 389 - protein, 394 aa, Digitalis purpurea
MYTDTTTWWYKRSIGDIEQKNVETNGVALNYKSVALIVGVTGIAGSGLAETLSKSDTPGGPWKVYGVARRPCPEWLAKLHVSYIQCDIGSTDDTSAKLSPLSDITHIFYVSWTGSEDCDKNAIMFKNILDSVIPNAPNLKHISLQTGIKHYWGNMVDEMDTTNVSHDCPFYENMPRLRQPNFYYNLEDLLYEACGTQNGALTWTVHRPALIFGFSPCSLMNIVATLSVYAAICKYENKPLVYTGTETSWNCLVDAVDSDLLADHLVWGAISPNAKNQAFNINNGDVFKWKHIWKVLADQFEIEFVGYEGKEPVSLEGLMKDKDSVWDEIVERYDLVPTKLKDIAAFWFADVAFSIEGAVSSMNKNKEFGFMGFRDSTKSFISSVNKVRTYRFVP

SEQ ID NO: 390 - protein, 389 aa, Antirrhinum majus
MASWWWKGAIGAAMTKSEDNDKAPQNVALIVGVTGIVGNSLAEILPVSDTPGGPWKVYGVARRPRPAWNADHPVQYIQCDVSDPTQTQSKLAPLTDITHIFWVTWANRPTEAECCDINGTMLQNVYDALLPNAPNLTHICIQTGQKHYIGPFETFGKVKPHETPFVEDVPRLDVPNFYYTLEDLTLEACKKKEGLTWSVHRPAAIFGFSPHSMMNMMDSLCVYAAICKHENVPLKFPGTKASWNCYFVCSDADLIAEQQIWSSVDLNGKNEAFNCSNGDLFKWKQMWKVLADSFEVEYEEFDENQEYVSLAERMKDKGPVWDEIVEKNNLLPTKLEEVATFWFADLMFYGECMLDNMNKSKEHGFFGFRNSEKTVLSVIDKMKAHKIVP

SEQ ID NO: 391 - protein, 366 aa, Trifolium subterraneum
MDEGVKGSCEEDEEFKEAPRSSQNIALIIGVTGIVGNSLAEILPLKDTPGGPWKVYGVARRPRPMWNADNPIHYIQCDVSDQNDVELKLTTLTDVTHIFYVSWTSRPTEAQNCEVNGSMLRNVLRSLIPNAPNLCHVSLQTGAKHYVGPFETIGKIKPHESPFMEDVPRLDTLNFYHTLEDILFEEVGTCMMNLIGTLCVYAAICKHEGLPLRFPGSKGAWECYSTASDANLIAEQHIWGAVDSNARNKAFNCSNGDVFKWKHLWKVLADKFGIEDYGFEEGLELKLTEVMKDKRGVWEEIVRENGLQPNKLEDVGDWWFADFTLRVEGVLDSMNKAKEHGFLGFRNSKDSFVSWIDMTKAYKIVP

SEQ ID NO: 392 - protein, 452 aa, Corchorus capsularis
MGANQKKVKLNKDDGSVLAFWTTLGSGQSFWVRKITSFYFRSCFEDFAHLRISSWDFDFGVGCGFRVEWGALEKKFEGDEAPSNFESVGLIVGVTGIVGNSLAEILPLSHDTPGGPWKVYGVARRPRPSWNADHPIEYIQCDISDSKDTEAKLSPLTDITHIFYVSWTNRSSEAENCKINGSMFRNVLRAVIPNAPNLRHICLQTGGKHYVGPFESFCKIQLHEPPFTEDLPRLNTPNFYYTQEDILFEEVQKKEGLTWSVHRPTATFGFSPYSLMNVIGTLCVYAAICKHEGKPLLFPGNKDAWEGFSEASDADLIAEHQIWAAVDPYAKNEAFNVSNGDLFKWKHLWTVLAEQFGIEEYGFEEGKNLGLQEMMKGKERVWEEIVKENQLQETSLADVGVWWFADLVLSVSAAMAMLSMNKSKEHGFLGFRNSKNSFVTWIDKMKAYKIVP

SEQ ID NO: 393 - protein, 331 aa, Nicotiana tabacum; identical to SEQ ID NO: 381

SEQ ID NO: 394 - protein, 409 aa, Panicum hallii
MIRWCWTGEHGAVQERRAADTEAAAPAFANVALVVGSTGTVGAALVDMLQSTDAPAGPWKVYALCRRPLPPWCTSGSAASTSSPNAVVVSLQVDLANAAAVAAALAPLADITHVFYAAWSPQRGSPDAVACETNRAMLRNVLSAVVPSCPALAHVCLQTGRDQFVDPFDPVMGTTSATRPYSEDLPRLEHPDLEDVLLIELPGFVASRRDRAPVTWSVHRPATVFGFSSRSGRNVVSSLCVYAAICRKEGAALRWPGSRVAWEGFSDASDAELVAEHALWAALELRCKNEAFNCTNGDVFKWKQLWPALAKHFAVEWSGYDGEDKRFKLEEAMAGKEAVWTEIVRENGLLETKLDDTTTWWSVDAVLNADQEQVDTMNKSKELGFFGFRHTVRSFDTWITKLKASGIVP

SEQ ID NO: 395 - protein, 366 aa, Medicago truncatula
MISDLSIYHFGAHHITEFKESPRSFQNVALIIGVTGIVGNSLAEILPLDDTPGGPWKVYGVARRPQPNLSPLTDVTHIFYVSWTSMPTEAQNCKVNGSMLRNVLRALIPNTLNLCHVSLQTGIKHYFGSFEIVGKIKPHESPFTEDVPRLVTPNFYHTQEDILLEEVGKKKGMTWFINRPQVIFGFSPYSMMNLIGTLCVYAAICKHEGLPLRFPGSKGAWECYSTASDANLISEQHIWGAVDPNAKNEAFNCSNGDVFRWKHLWKVLAERFEIDDYGFEEGSELRLSDLMKDKGGVWEEIVRENELLYTKLEEVGDWWFADFMFRVEGVLDSMNKSKEHGFLGFRNSKNVFISWIDKTKVYKIVP

SEQ ID NO: 396 - protein, 393 aa, Juglans regia
MITWLWARAVGATKKINEAEEAVLPPGSYQSVGLVIGVTGIVGNSLAEILPLPDTPGGPWKVYGVARRPRPKWNAKHPVHYIQCDVSNSEETEAKLSQLADVTHIFYVTWASRQTEAENCEVNGAMFRNVLRALIPNAPKLRHICLQTGAKHYIGPFEAFGKIQPHEPPFTEDLPRLNVPNFYYTQEDILFEEAKKKEGLTWSIHRPNIISGFSPYSMMNIIGTLCVYAAICKHEGLPLKFPGNKASWEGYSVASDADLIAEQHIWATVDPNARNEAFNCNNGDVFKWKHLWKVLAERFGIEKYGFEEGEKVSLVEMMKDKGPVWEEIVRKNHLQPTKLEEVGVWWFADLFLCVEGALDSMNKSKEHGFLGFRNSKTSLITWVDKMKGHNIVP

SEQ ID NO: 397 - protein, 334 aa, Triticum urartu
MKKIAGGKAFIMQSKHMKVNYLLLTQVRNSPGAFTDLPRSASDAAAYYRSEEGSSTEKVFWSQYAEAGHLVPLSDQLKQMVELHKPGRKHYIGPYEAIGKIPVPDPPYTEDMPRLDYPNFYYDQEDVLFEEVSRRDGAVSWSVHRPSVVFGFSPRSAMNVVASLSVYAAICRKEGAMLRWPGSRVAWEGFSDASDADLVAEQEIWAAVDPLARNEAFNCSNGDLYKWKQLWPMVADRFGVEWAGYEGEDSRFMLADAMAGKEAVWAEILQENELVTTELQEIANWWFLDAVFNVKCEHLDSMNKSKEHGFLGFRNTAKSFNAWIDKMKVLKIVP

SEQ ID NO: 398 - protein, 386 aa, Citrus clementina
MLVQNKLDEGEPSRDNQHVGLIVGVTGIVGNSLAEILPQPNTPGGPWKVYGVARRPRPAWNADHPIQYIQCDVSDADETQAKLSKLTDVTHIFYVTWASRPTELENCHVNGAMLRNVLRSVMPNAPNLRHVCLQTGGKHYLGPFDYFVDTQLPHHPHDPPYTEDLPRLNVPNFYYDQEDILFEEVAKRDGLTWSVHRPLGIFGFSPYSMMNIACTLCVYAAICKHEGVPLLFPGTKEAWDGFTEVSDADLIAEQQIWAAVDPNARNEAFNCANGDVFKWKHFWKVLAERFEIEDYGFDEKGERLRLVEIMKGKESVWEEIVRKNKLLPTKLNEVAIWWHADVSFDVGEDILVSMNKSKGHGFLGFRNSKNSFIAWIDKMKRYKIVP

SEQ ID NO: 399 - protein, 415 aa, Panicum hallii
MMRWCWTGAYGTIERRHIVARAAAEAEAAATASQKVALVVGSTGVVGAALLDILPSLDTPVGPWKVYALSRGPLPPWSAPAGAPSSSYPNPVIHLHLDLADPAAVAQALKPLTDITHVFYTAWSACPGATEDDAREASCAMLRNVLSVVVPRCPALVHVCLQTGRKGFVDPFEPMSGFFAAIVAMRPYPEDVPHLEHSDLEDVFLDEVAHSWLNGAAGAITWSVHRPATLFGFSPRSESNVIASLCVYAAICCKEGAALRWPGSLVAWEGFSDASDAELVAEHALWAALEPSGKNETFNCTNGDIYKWKNLWPMLADHFEMEWSGYDGEDKRFKLEEAMAGKEALWAEIVREKGLVETELNDITSWWFVDALINAGKEQIENMNKSKERGFLGFRNTVRSFNTWIGKLKADKIVP

SEQ ID NO: 400 - protein, 385 aa, Prunus persica
MNFKLQRKHEEDHEAPHTPKSVGLVIGVTGIVGNSLARILPQSDTPGGPWKVYGVARRPRPHWNSDYPMEYIQCDISDPKDTVSKLSRLTDVTHIFYVTWASRSTEPQNCEANAAMIRNVLRVVITNAPNLCHVCLQTGTRHYFGPYESLGKVEPQEPPCLEDLPRLNAPNFYYALEDVLFEEVGKKEDLNITWSVHRPGSIFGFSPYSLVNIVAMLSVYASICKHEKKPLRFPGSEAAWNCYSDVSDADLIAEQQIWAAVDPNAKNEAFNVNNGDVFKWKQFWTVLAEQFEIEEYGFDEEGGGFSLLEMMKEKEGVWEEIVRENQLEPTKLEEIGWWLLDLFFSGEGLMTSMNKSKEHGFLGFRNSRKSFVSWIDKNKAFKIVP

SEQ ID NO: 401 - protein, 384 aa, Tarenaya hassleriana
MNTIEAPKKKLDAEPHYRSVGLIIGVTGIVGNSLAGILPLSDTSGGPWKVYGVARRPRPDWTTDQQIQYIQCDVSDAIDVRTKLSPLTDVTHIFYVTWTNRETESENCSANAAMLRNVLRAVVPHAPNLRHVCLQTGTKHYAGPFDNVAGRSFHDSPFTEDLPRLSLRNFYYDQEDVLFEEVEKKEGLTWSVHRPNRIFGFSPYSLINMVGSLCVYAAICKHEGSPLMFPGSKAAWEGFTVASDADLVAEQEIWAATDPYAKNKAFNCNNGDVFKWKHLWKILAEKFEIEEYGFEEEEGREKVGLVKMMEGKDRVWGEIVKEKDLEKTKMEEMGEWWVVDLILRVEGMVDCMNKSKEHGFLAFRNSTKSFAYWIDKYRAHKIVP

SEQ ID NO: 402 - protein, 441 aa, Capsicum baccatum
MNVLVCLRDWIRAERRNQGIEKEPNDKQRLEEIMTSRENLAESSLMHGFAPIDFDYPMQQNVEYCGTHEISYQNVGLVIGITGVVGNSLAETLSSTDTPGGPWKVYGVSRRGKPVCSIAKVRYIQCDVSVSTDVQSKLSTLKDVTHIFWVTSAFDLSTAKCCEINGAMFRNVLNAVIPNAPNVCHICLQTGAMHYMEIQRSIDGKLHVISHDPPFTEDMERLENIHNFYYTLEDVLFDEVSRKPSLTWSIHRPDLIFGFSHHSMLNIVGTLCVYATICKHECIPLIFPGTKAVWDSYSNASDANLVAEHQIWAALGAQGKNKAFNITNGDVFKWKQLWKVLAEQIGVEYVGFDETEKIISLSEMMKDKGTVWEKIVRDNNLISTTLQEVGLWDFADMLLAGGTSRLCSINRSKEHGFFGFRNSINSFIFWIQKAKDNRLIP

SEQ ID NO: 403 - protein, 390 aa, Medicago truncatula
MNWWLARATGDHPGKITKFKEAPRNVQNVALIIGVTGIVGNSLAEILPLKDTPVGPWKVYGVARRPRPMWNVDNPVHYIQCDVSNQNDVELKLSPLTDVTHIFYVSWTSRPTEAQNCEVNGAMLRNVLQALIPNAPNLSHVSLQTGAKHYVGPFEIIGKIKPHESPFTEDVPRLDTPNFYYTLEDILFEEVGKKKGTTWFINRPQVIFGFSPYSMMNLIGTLCVYAAICKHEGLPLRFPGSKGAWECYSTASDANLISEQHIWGAVDPNAKNEAFNCSNGDVFRWKHLWKVLAERFEIDDYGFEEGSELRLSDLMKDKGGVWEEIVRENELLYTKLEEVGDWWFADFMFRVEGVLDSMNKSKEHGFLGFRNSKNSFISWIDKTKAYKIVP

SEQ ID NO: 404 - protein, 395 aa, Nicotiana sylvestris
MNWWWSRSTNTTQQNVDYYETTNHESNQNVGLVIGVTGVVGNSLAETLSSTDSRGGPWKVYGVARRETPVRNAKVTYIQCDVSVATDTQAKLSTLEDVTHIFWVTSAFDLSMAKHCEINATMLHNVLNAIISNAPNLRHICLQTGAMHYMGIHRSVDGKIHTISHDPPFTEEMERLENIHNFYYTLEDVLLDEISRKPSITWSVHRPDLIFGFSPHSTLNIVGTLCVYATICKYERVPLTFPGTKVRWDSYSNASDADLVAEHQIWAALCPRAQNKAFNITNGDVFKWKHLWKVLAEQIGVEYVGFNETEKHICLAEMMKDKGHVWDKIVRDNNLVSTTLEEVGLWQFADMILAGGSNRLSSINRSKEHGFMGFRNSTNSFIFWIQKAKDNRLIP

SEQ ID NO: 405 - protein, 366 aa, Oryza sativa
MPPMSMSWWWAGAIGAARKRHDGGGGEQQPPFRSVALVVGSTGIVGTSLVDILPLPDTPGGPWKVYALSRRPPPPWSPPPPAAVTHLCVDLADAAAVAEALAPLTDITHTGSKHYIGPPESIGKLPVETPFSEDMPRHDYPNFYYDQEDVLFDAVTSSSSSSSSRRAAAVTWSVHRPSLIFGFSPRSAMNVVCSLCVYAAICRKERRELRWPGSLGAWEGFSNASDADLVAEQQIWAAVADAAAKNEAFNCSNGDIYKWKQLWPVLAGKFGVEWAGYEGEERRVGLTAAMAGKEAVWAEIVAEEKLVATELGEVANWWFVDALFMDKWEFVDTMNKSKEHGFLGFRNTLRSFEAWIDKMKLYRIVP

SEQ ID NO: 406 - protein, 410 aa, Oryza sativa
MPPMSMSWWWAGAIGAARKRHDGGGGEQQPPFRSVALVVGSTGIVGTSLVDILPLPDTPGGPWKVYALSRRPPPPWSPPPPAAVTHLCVDLADAAAVAEALAPLTDITHVFYVALAAPHLAEARSREANAGMLRNVLAAVVPTCPALAHVALQTGSKHYIGPPESIGKLPVETPFSEDMPRHDYPNFYYDQEDVLFDAVTSSSSSSSSRRAAAVTWSVHRPSLIFGFSPRSAMNVVCSLCVYAAICRKERRELRWPGSLGAWEGFSNASDADLVAEQQIWAAVADAAAKNEAFNCSNGDIYKWKQLWPVLAGKFGVEWAGYEGEERRVGLTAAMAGKEAVWAEIVAEEKLVATELGEVANWWFVDALFMDKWEFVDTMNKSKEHGFLGFRNTLRSFEAWIDKMKLYRIVP

SEQ ID NO: 407 - protein, 379 aa, Cynara cardunculus
MRKLEDGNPSRKYQKFALIIGVTGIVGNSLAEILPLHDTPEGPWKVYGVARRPRPSWNDDYPIDYIQCDVSDPEQTQSKLSTLTDLTHLFYVTWANCETESENCDINGKMFTNVLNAVIPNAPNLQHICLQTGRKHYIGSLEAIMAKKFVHDPPFHEDLPRLDSPNFYYTLEDILFKEVEKKEGLTWSIHRPGVIFGFSPNSMMNILLGLCAYASICKHEGQPLTFPGTKEAWNSFTDASDADLIAEHQIWAAVDPIAKNEAFNISNGDVFKWKHLWKILAEQFEVENGGFREDGEKKSLGEMMKDKGGVWDEIVKEKGLLVNKLEEVGKWWFVDVVLSNEGMLDIMNKSKEHGFLGFRNTKSCFVSWIDKIKCSKIVP

SEQ ID NO: 408 - protein, 391 aa, Ornithogalum longebracteatum
MRWWWAGAIGAAKRSMDSTPPQGPTYQSVALVVGATGIVGSSLIDILPLSDTPGGPWKLYAISRRPLDSSSPSVVHVQCDVADPDETLAMLSPLSDVTHVFYAAWAHRPSEHDNITVNSAMLRNVLAAVVPNAPNLQHVCLQTGRKHYVGSFEYLGKIQGHEPPFHEDLPRLDSPNFYYNQEDILFEESEKTDGRVSWSVHRPTTIFGFSAISKMNIMQSLCIYAAICRKERALLRWPGSRVTWEGFSDASDADLIAEHQIWAAVDPYAKNEAFNCSNGDVFKWKQLWRTLAEQFEVGFVGYEGEEGRFSLEEAMRGKEEVWAEIVRESELVETRLEDVGNWWFVDAVLGVEFEHLDTMNKSKEHGFLGFRNTMNSFISWIDKMRAFKIVP

SEQ ID NO: 409 - protein, 397 aa, Allium ursinum
MRWWWAGAIGAARKTLDSSSASNSNTSIPPPQSIALVIGATGIVGTSLLDILPLADTPGGPWKLYAVSRRPLVSDNPKVHPVQCDISDSAQTLERLSPLSDVTHIFYVALAQCPTEAENIAANSAMLRNVLNSVIPNAPNLQHICLQTGRNHYSGAFEFAGKVKPHDPPFYEEMLRLNSPNFYYNMEDILLEEVEKRDGVRCHGSVHRPTIIFGFSTRAAMNIVQGVCVYAAICKNGGKALRWPGSRVTWEGFSDASDADLVAEHQIWAAVDPYAKDEAFNCSNGDVFTWKQLWKALAEQFELEWVGYEGEDKSFSLEKEMRGKEAVWKELVRENELVDTKLEEVGNWWFLDLVLGAEIEHLDSMNKSKEHGFLGFRNTLNSFNSWVDKMKAFKIVP

SEQ ID NO: 410 - protein, 398 aa, Convallaria majalis
MRWWWAGAVGAARKKIDDGPPAAPKFQSVGLIIGDIGLVGNSLAEILPLSDTPGGPWKVYGVSRGPKPPPSDPPTFGSFDHVACDVSNLDRTLEKLSPLAADVTHLFYVGDDEESDPTANSSMFRNVLEAVLPSAPNLQHICLLTGLEHYLGPLEAWGKIPAHDPPFREDLPRLDAPNYCYDLEDVLLESVKDEWGGRGTWFGPPAPPHSIFGFSTKCSMNLIGTLCVYASICRKEKVPMRYGPGNRVQWEGFSEASDADLVAEHQIWAAVDPYAKNEAFNCNNGDVFKWKHMWKVLAEQFGVEFVGYEGEDGERARLADAMKGKEEVWEEIVRENELVPTKLEVVGNWEFVDTMLNAEDSYLSSMNKSKEHGFLGFRNSVSSFISWIDKAKAFKIVP

SEQ ID NO: 411 - protein, 391 aa, Populus trichocarpa
MSCWWAGALGNNRKKFYDDDEASRDYKSVALVVGVTGIVGNSLAEILPLADTPGGPWKVYGVARGKRPNWNEDNPVEYIQCDISDRNQTQSKLSLLTDVTHIFYVTWANRETESENCKINGLMFRNVLEAVILNAHNLRHICLQTGTKHYVGPFQFFGKIEAHDPPFTEDLPRLEFPNFYYTLEDILFQEVAKKEGLTWSVHRPDNIFGFSPHSLMSIVRTLCVYAAICKHEGTLMRFPGVKEVWNCYAIASDADLIAEHEIWACVDPSAKNEAFNIHNGDVFKWKHLWKVLGEQFGLEEYGFVETEERISLAETMKEKGAVWEEIVRENQLLPTKLEEVGAWWFVDLIFGGEVSIPSMNKSKEHGFLGFRNSKKSFISWIEKMKASKVVP

SEQ ID NO: 412 - protein, 408 aa, Sorghum bicolor
MSLPPHLHFDFDQELEHKMECEGTKKVVLVIGSTGIVGSALINLLLLENPKNPVGSCKKVYALSRRPMPPWYMTASSSSFSSNNDPIPTVIHLHVDLADDAAVTKALAPLTDITHVFYVTWAPRHGWSNTEAHTVNRAMLSSVLSAVIPNAPDLKHVALQSGRNQSADPFQPPVRGAFAEDGWLGPFSEDLPRPDYPDLEDALIDGIASRVGDVTWSVHRPATILGFSPRSSRNLVSSLCVYAAICSKEGAVLRWPGSLVAWEGFSDACDAWLIAVQAIWAAMMARPNEAFNCGNGDVFKWKQLWPILASYFGVPWAGYEGEDQRFKLEEAMVGKEPVWAEIINENGLVETELDDITTWWLVDAVVNAEKEHVETMNKSKEFGFHSIYDTVRCFDTCIRKMKASRIVP

SEQ ID NO: 413 - protein, 401 aa, Zea mays
MSLSWWWTRSVGADRERKDELAAVPEHSFQSVALVVGSTGIVGASLVDIIPRADTPGGPWKVYALSRRPPPPWSLPSSSSLTHINVDLTDSATVAEALTPLTDITHVFYVAWSPRATEAENREANSAMLRNVLSVVVPNCPALAHVSLQTGIKHYLGPFELIGKIPTPDPPYTEDVPRLDCPNFYYDQEDVLFAAVSRRGGAVSWSVHRPNLILGFSPRSFFNVVCSLCVYASICRKEGVALRWPGCLGSWESFSNASDADLIAEQHIWAAVDPMAKNQAFNCNNGDLYNWKMLWPVLAARFGLEWTGYDGEEKQFKVSEAMAGKEAVWAEIVRENGLVETRLYDVADWWFIDFVVYEHSADSKLLDSMNKSKEHGFLGFRDTVKSFGKWIDKMKAYKIIP

SEQ ID NO: 414 - protein, 387 aa, Daucus carota
MSLWWSGAVAAAKKRMGQLEYASAPSRYNSVALVVGVTGIVGNSLAEILPLSDTPGGPWKVYGVARRPRPPWKVDERVDYIQCDICDLDETRLKLSMLQDITHVFYVTWANRPNESENCEINGKMLRNVLNALIPNSPNLKHICLQTGRKHYVAPGSEDHDPPYTEDLPRLDSPNFYYILEDILFEQVGKKEGLTWSVHRPAPIFGFSPYSLMNIIGTLCVYATICKHEGVPMRFPGTEEAWNCYSDASDADLIAEHQIWAAVDPYAKNEAFNCSNGDVFRWKHFWKVLGQQFEVECGYLEAGERLSLAEMMKDKGPVWDKIVKEKGLVPTKLEEVAAWWFADGMFSGPCPLISMNKSKEHGFFGFRNSKSCFIYWIDKMRSYRVVP

SEQ ID NO: 415 - protein, 397 aa, Nepeta cataria; identical to SEQ ID NO: 372

SEQ ID NO: 416 - protein, 394 aa, Catharanthus roseus
MSMRWWWAGGAIGAAKKKLQVDDGPPKHQSVGLILGVTGLVGNSLAEILPLSDTPGGPWKVYGVARRSRPTWHADHPIEYIQCDLSNPEETESKLSNLTDVTHIFYVTCVTANKYTDAENCDANGKMFRNVLNAIIPNCPNLQHICLQTGLKHYFGRSLVGNFVCHESPCYEDLPRLDVPNFYYTLEDILYEEVQKKEGLTWSVHRPGTIFVFSPFSSMNLVGTLCVYAAICKQQGLPLKFPGSKNVWEGYSMCSDADLVAEQQIWAAIDHLPNAKNEAFNVSNGDVFKWKYIWKVLAEQFGLEFVEFDGEKLSLQEMMIDKGPIWEEIVRENGLLGTKLEQVGVWWFADVLLGFEFPLDSMNKSKEHGFLGFRNSKNSFLSWIEKTKAYKIVP

SEQ ID NO: 417 - protein, 401 aa, Dichanthelium oligosanthes
MSMSWWWAGAIGAVSKRQDDHAAVSPSQHGFQSVAVVVGSTGIVGTSLVDILPLPDTPGGPWKVYALSRRPLPPWSLASSPSSVTHIHVDLTDSAAATEALTPLTDITHVFYVAWTWRATEEENCEANSAMLRNVLSVVVPNCPSLVHVTLQTGTRHYFGRYSENPVHDTPYTEDMPRLDMPVFYYDQEDVLFDAVERRGKTVSWSVHRPNIIFGFSPRCAINLVCSLCVYAAICRKEGAPLRWPGSCGGWEGFITPSDADLVAEHHIWAGVEPMAKNEAFNCSNGDVCTWKKLWPILAGRFGLEWAGYEGEENRFKLTEAMAGKEELWAEIVEENELVATHVSEVANWWVIETSADQYGLNSPILDSMNKSKEHGFLGFRNTFKSFNACIDRLKAHRIVP

SEQ ID NO: 418 - protein, 413 aa, Sorghum bicolor
MSMSWWWRGAIGATRRRQDEHATATTERRPFQSVALVVGCTGIVGASLVDILPLPDTPGGPWKVYALSRRPLPPWWQYRHPPSSSSSVVTHLQVDLTDSAAVAKTLTPLTDITHVFYAALSAPSTVDEAKNREANSAMLRSVLAAVVPNCPRLRHVCLQTGTKHYMGPPASFGRRTTAHDPPYTEDMPRLDWPNFYYDQEDVLLDAVAAGAGAVTWSVHRPSLVFGFSPRSAMNVVCSLCVYAAICRKDGVPLQWPGSLGAWEGFSNASDADLVAEQQVWAAVVDHPMGMAKNEAFNCSNGDVFRWRQLWPILAGRFGVEWAGYRGEENRVKLVDAMAGKEPVWAEIVEESQLVPTQLHEVANWWFVDALFCAKWEFLDSMNKSKEHGFLGFRNTAKSFDNWIDKMKACKIVP

SEQ ID NO: 419 - protein, 380 aa, Tarenaya hassleriana
MSRQIYHKNVALIIGVTGLVGNSLSEILLKPETNGGPWKVYGVARRPRPRWNSDCRIEYIQCDVSDAETTRRKLSCLTDVTHVFYVTWASRETEAECCDANAAMLRHVLTAVAPSLRHVVLQTGTKQYVGPYESLGRIRTHEPPFSEDLPRLPYPNFYYALEDVLCQELEKTDQSVSWSVHRPNVVFGFSPYSLANIVFSFCIYAAVCKHEGVPMYFPLSKTTWECYSVASDADLIAEQEIWAAMEASCKNEAFNCSNGDVFKWKQLWGILAESFGIEEYGFEEGKNLGLVEMMKDKGNAWREIVEKHGLEETELDDGIVGSWKIVDAVMAEGGLLDCMKGDGILDSMNKSKEFGFLSFRNSKKSFVHWISKYKDHKIVP

SEQ ID NO: 420 - protein, 425 aa, Citrus sinensis
MSRRWWAGAVDAPKKQKPNLSSIFQNHQKKSWSWSWSWASDIGAPKKKLDEDKRPRDYQLVGLILGVTGIVGNSLAEILPRSDTPGGPWKVYGVARRPRPDWNANHPIEYIQCDISDQEETQAKLSKLTDVTHIFYVTWASRPTEVENCQINGSMFRNVLRSIIPNAPNLRHICLQTGGKHYLGPFDCIGKIPYDPPFTEDLPRLNIPLFYYNQEDILFEEVEKREGLTWSIHRPFGIFGFSPYSLMNIIATLCMYAAICKHEGIPLLFPGTKETWEGFSEYSDADLIAEQQIWAAVDANARNEAFNCTNGDVFKWKHLWKALAEQFEIENYGFGDEKDSERMRLGEFMKGKESVWEEIVRENQLQPTKLNEVAVWSYADMGLNIGAGYLVSMNKSKEHGFLGFRNSKNSFVTWIGRLKSHRIVP

SEQ ID NO: 421 - protein, 399 aa, Picea sitchensis
MSSFSWWAGSLGHGVRKFETKGESSEDKSEKQQGVALVIGVTGIVGNSLVEILPLSDTPGGPWKIYGVARRPKPDWSPDTPVEYIQCDVLDRKLTLEKISPLKDVTHLFWVVWVSRETEEQNCEDNGRMLSNVLDALLPNAENLQHICLQTGAKHYLGPFDAVARNRYFQPHEAPYHEELPRLPVPNFYYTLEDIVFEAAKKKDGLTWSIHRPSFIFGFSPWSLMNILGTLCVYAAICKHEGLPFKYPGNRITWEQFVDISDAELIAEQEIWAATYPHAKNQAFNCSNGDVLKWKRLWGIIAEKFDLEPLPYKGEGFSLAEAMKDKGPVWDALVRENKLHPTKIEEVGNWWFADFTLNLPQETVHSMNKSKEYGFFGFRNTETSLGQWIDKMKASNVVP

SEQ ID NO: 422 - protein, 339 aa, Cajanus cajan
MSVGLVIGVTGIVGNSLAEILPLADTPGGPWKVYGVARRPRPPWNADHPVEYIQCDVSDPADADAKLAALSDVTHVFFVSWTNRPTESENSEVNGAMLRNVLRAVIPNAPNLRHVSLQTGTKHYLGPFELIGKIESHEPPFTEDLPRLDAPNFYYTQEDILFDEVSKKEGLTWSVHRPQTIFGFSPYSLMNVVGTLCVYAAICKHEGVPLRFPGTRSAWEGYSCCSDADLIAEQHIWAAVDPYARNEAFNCSNGDVFRWKHLWKVLAEQFGIEDENQLLPTNLDEVGLWWFVDVIFSVEGMGLLDSMNKAKEHGFLGFRNSKNSFVSWIDKTKAYKIVP

SEQ ID NO: 423 - protein, 344 aa, Citrus clementina
MSWFWAGAIGAAKNVGLVIGVTGIVGNSLAEILLRSDTPVGPWKVYGVARHPRPNWNDDYPVEYIQCDVSDQEDTQAKLSKLTDITHIFYVTWASRRTEAENCQINGAMFHNVLSSVIPNAPNLRHICLQTGGKHYVGPFEFVGKIPSHDPPFTEDLPRLNVTLFYYTLEDILFKEIDKREGLTWSVHRPHGIFGFSPYSLMNITATLCVKFWAAVDPNARNEAFNCTNGDVLKWKHLWKVLAEQFEIENYGLEDGKCSERVRLEEIMKGKESVWEEIVRENQLQPTKLNEVAVWSYADTVMNVGAGYLVSMNKSKEHGFLGFRNSISSFVTWIGRLKSHKIVP

SEQ ID NO: 424 - protein, 389 aa, Aquilegia coerulea
MSWRWSGANGAAKNKLEEDEVPSNYQSVGLVIGVTGITGNSLAKILPLSETPGGPWKVYGVARRPRPTWNTEYPIEYIQCDITNKDETLLKLSSLTDITHIFYVAWTPCPTDAENCQVNSKMLRNVLQAVVPNAPNLKHICLQTGIKHYTGDFESFGKNLAHDAPFCEDLPRLDTPNFYYTQEDILFEEIDNKEGLTWSIHRPALIFGFSPYSLMNVIGTLCVYAAICKHEGKKLQFPGPRAAFEGYFDASDADLIAEHQIWASVADQHAKNEAFNCTNGDVFQWKHLWKVLGEQFGIECAEFEEGVSLQELMKDKGPVWDEIVKENKLCPTKLEEVGAWWVVDTFFSWKELGLSSMNKSKEHGFFGFRNSTTSFISWIDKMKVYKIVP

SEQ ID NO: 425 - protein, 388 aa, Lonicera japonica
MSWWCKWSIGAGKNLPNQNKENGVCKSYKSVALVVGVTGIVGSSLAEVLKLPDTPGGPWKVYGVARRPCPVWLAKKPVEYIQCDVSNNQETISKLSPLKDITHIFYVSWIGSEDCQTNATMFKNILNSVIPNASNLQHVCLQTGIKHYFGIFEEGSKVVPHDSPFTEDLPRLNVQNFYHDLEDILYEETGKNNLTWSVHRPALVFGFSPCSMMNIVSTLCVYATICKHENKALVYPGSKNSWNCYADAVDADLVAEHEIWAAVDPKAKNQVLNCNNGDVFKWKHIWKKLAEEFGIEMVGYVEGKEQVSLAELMKDKDQVWDEIVKKNNLVPTKLKEIAAFWFADIAFCSENLISSMNKSKELGFLGFRNSMKSFVSCIDKMRDYRFIL

SEQ ID NO: 426 - protein, 392 aa, Olea europaea; identical to SEQ ID NO: 377

SEQ ID NO: 427 - protein, 392 aa, Thlaspi densiflorum
MSWWGAGAIGAAKKKFDDDEPTQSYESVALIIGVTGIVGNSLAEILPLSDTPGGPWKVYGVARRPRPSWNADHPIDYIQCDVSDAEDARSKLSPLTDVTHVFYVTWTSRSSESENCEANGSMLRNVLGAIVPNAPNLRHVCLQTGTKHYLGPFDSAGDESVHRHESPFTEDMPRLQIPNFYYTLEDILFEEIKKKEGVTWSIHRPNTIFGFSPYSLMNIVGTLCVYAAICKHEGSPLLFPGSKKAWEGFTTASDADLVAEQQIWAAVDEFAKDQAFNCNNADIFKWKHLWKVLAEQFGIEEYGFEEGKNVGLVEMMKGKERVWEEMVKENQLQEKKLEEVGVWWFADVILGVEGMIDSMNKSKEHGFLGFRNSNNSFVSWIDKYKAFKIVPL

SEQ ID NO: 428 - protein, 390 aa, Stellaria media
MSWWGAGAIGAAKKKIDEDDDEPQSYQSVGLIVGVTGIVGNSLAEILPLADTPGGPWKVYGVARRPRPEWNTDHPIQYIQCDVSDPDDALSKLSPLTDVTHIFYVTWTTKSSEIENCRANVSMLRNVLQAVIPNAPNIQHVCLQTGAKHYVGPFDSFGKIQPHEPPFTEDMPRLPVPNFYYDLEDALFEEVQKKEGVTWSVHRPTTIFGFSPYSLMNIVGSLCVYAAICKYEGKPLVFPGTKAAWEGFAVASDADLIAEQRIWASVDPFAKNEAFNCNNGDVFKWKHLWKSLAEQFGIEDYGFEEGKNVGLKTMMDGKQSVWEEIVRKNQLQETKLDEVGSWWFVDIILGVEGALDSMNKSKEHGFAGFRNPKNSFVSWIDKCKAFKIVP

SEQ ID NO: 429 - protein, 389 aa, Erysimum crepidifolium
MSWWGAGAIGAAKKKLDDDEPSQSYESVALIIGVTGIVGNSLAEILPLSDTPGGPWKVYGVARRPRPSWNADHPIDYIQCDVSNAEDARSKLSPLTDVTHVFYVTWTKRESESENCEANGSMLRNVLQAIVPHAPNLRHICLQTGTKHYLGPFSNLDGPRHDPPFTEDMPRLQIQNFYYTQEDILFEEIKKKEISVTWSIHRPNTIFGFSPYSLMNIVGTLCVYAAICKHEGSPLLFPGSKKAWEGFTTASDADLIAEQQIWAAVDPYAKNEAFNCNNADIFKWKHLWKILAEQFGIEEYGFEEGKNLGLVEMMKGKERVWEEMVKENQLQEKKLEEVGVWWFADVILGVEGMIDSMNKSKEHGFLGFRNSNNSFISWIDKYKAFKIVP

SEQ ID NO: 430 - protein, 378 aa, Morus notabilis
MSWWLAGAIRAAKKKREYDYAPSEYQSVALVVGVTGIVGNSLAEILPLSDTPGGPWKNADHPITYIQCDVSDPQQTKDHLSKLTDVTHIFYVTWSSQPTEAENCSVNGAMLGNVLEAVIPHAPNLQHICLQTGRKHYIGPFELLGKVEPHEPPFHEDLPRLDAPNFYYVQEDILVEEVKKKEGLTWSVHRPGVIFGFSPSSLMNIIGSLCVYAAICKHEGMKLRIPGTREGREAYLDASDADLIAEHQIWAAVDTYAKNEAFNCSNGDVFKWKHMWKVLTEQFELEYEEFEDDGDSLTLVEMMKDKGEVWDQIVKENGLVPTNLEEVGNFWFADLVLTLGTTLDSMNKSKEYGFVGFRNSKSSFISWIDKMKSYKIVP

SEQ ID NO: 431 - protein, 392 aa, Helianthus annuus
MSWWLSGVVGATRRKRGDTNPSLKYKGFALIVGVTGIVGNSLAEILPLHDTPGGPWKVYGVARRPRPPWNADYPMEYIQCDIRDEEQTLTQLSNLQDLTHVFYVTWANCSNEQHNCEINGQMFKNVLNAVIPNCPNLQHICLQTGRNHYIGPFDDWGTLNGVQDAPFCEDLPRIENPNFYYTLEDILFKEVTKKEGLTWSVHRPGVIFGFSPCSMMNIVGSLCVYAAICRHEGEPLRFPGTRQAWESYHSASDADLIAEHHIWAAVDEYAKNEVFNISNGDVFKWKHFWKVLAEQFGVENGGLQEEGERRSLSDMMKDKGAVWDAIVTEKELLPTKLEEVGGWWFVDVVLGNEGMLDLMNKSKEHGFLGFRNSKSSFVSWIDKIKCSKIVPI

SEQ ID NO: 432 - protein, 323 aa, Capsicum annuum
MSWWRAGANGAAKKKFKEDDAPAKYESVALIIGVTSIVGNSLAKILPLADTPSGPWKVYGVAHRSRSSWNADHSIEYVQCDISNPEGHDSPFHEDLPRLVEPNFYYVLEDILFKAVEKKEGLTWSVHRPGTIFGFSPYCLMNIVGTLCVYAVICKHEGLPLKFPGVKEAWDVYSDCSDADLIAAHQIWPAVDPYAKNEAFSVSNGDFFKWKHFWKVLAEQFGVEPAECYEGKRCTLTKMMKDKGTVWDEIMKENGLVPIKLEEVGVWWFVDLMLAGDCPLDTMNKSKEHAIFAVHMALKSIIDKITIDTPDWTCKVQIVESLT

SEQ ID NO: 433 - protein, 407 aa, Macleaya cordata
MSWWWAGAIGAAKAKFLIPNLSLSLLLFCFFKKFEEDEVPPKYQSVGLIIGVTGIVGNSLAEILPLSDTPGGPWKVYGVARRPRPPWNADHPIEYIQCDVSDSDETLSKLSPLTDVTHIFYVTWTSRKTESENCEANGAMFRNVLRALIPNAPNLQHICLQTGRKHYLGPFEKLGEEIEHQVLPLHEDLPRLKTPNFYYTLEDILFEEVEKKDGLTWSVHRPGTIFGFSPYSVMNLIGTLCVYAAICKHEGTPLRFPGTRVAWEGYSDASDADLIAEHQIWTSVDPYAKNEAFNCSNGDVFKWKHLWKVLGEQFEVECAEFEEGLKLGEMMKDKGPVWDEIVKQNDLCPTKLEEVGAWWFVDTMFGAKESILDSMNKSKEHGFLGFRNSNSAFVSWIDKMKAFKIVP

SEQ ID NO: 434 - protein, 388 aa, Citrus clementina
MSWWWAGAIGAAKAKSYSKFINKLEEYEQTRDYQSVGLVVGVTGIVGNSLAEILPRPDTPGGPWKVYGVARRPRPNWNAAYPVEYLQCDVSDQEDTQAKLSKLTDVTHIFYVTWDGRRTEAENCQINGAMLHNVLRSVIPNAPNLRHICLQTGGKYYMGPLEFIGKIPSHDPPFTEDLPSLNISLFYYTLEDILFEEVDKREGSTWSVHRTFGIFGFLSFGVLMNIIATLCVYAAICNHEGVPLLFYGTIDTWEGFQQVSDAELIAEQQIWAALDSNARNEDFNCTNGDFEIEDYGLEDGKGCERVRLEEIMKGKESVWEEIVRENQLQPTKLNEVAVWSFADTVMNMGAGYLVSVNKSKEHGFLGHRNSKNSFVTWSGRLKSHRIVP

SEQ ID NO: 435 - protein, 392 aa, Arachis ipaensis
MSWWWAGAIGAAKATKKFEDDEPPRSFQSVGLIIGVTGIVGNSLAEILPLADTPGGPWKVYGVARRPRPSWNVDHPIEYIQCDISDPNDTQSKLSALTDVTHIFYVSWTRRPTEAENCQVNGAMLRNVLQAVIPNAPNLRHVSLQTGGKHYLGPFELFGKIQPHEPPFTEDLPRLKAPNFYYTQEDILYEETQTKDGVSWSVHRPQVIFGFSPYSLMNMVGTLCVYAAICKHERVPLRFPGTKSAWEDYTTASDADLIAEQHIWAAVDAYARNEAFNCSNGDVFKWKHLWKVLAEQYGITEYGFDEGSERLKLSEMMRDKGPVWDEIVRENQLSPTKLEEVADWWFVDVMFGGAGLLDSMNKSKEHGFLGFRNSKNSFISWIDKTRAFKIVP

SEQ ID NO: 436 - protein, 391 aa, Vitis vinifera
MSWWWAGAIGAAKKKFDEDDAPRGFQNVGLVIGVTGIVGDSLAEILPLSDTPGGPWKVYGVARRPRPDWNADHPVEYTQCDISDSEDALAKLSPLTDVTHVFYVTWTNRATEIENCEANGTMLRNVLRALIPNAPNLRHICLQTGGKHYIGPFEAFGKIKPHDPPYHEDLPRLDAPNFYYTLEDILFEECEKKDDLTWSVHRPVIIFGFSPYSMMNILGTLCIYAAICKHEGIPLKFPGSKAAWDCYSDASDADLIAEQQIWATVDPYARNEAFNITNGDLFKWKHLWKVLAEQFDMEYAEFEEGEEKQSMVEMMKDKGPVWEEIVREKELLPTKLEDVAQWWFIDLVLGGESLLNCMNKSKEHGFLGFRNSRNSFVWWIDKMRGHKLIPP

SEQ ID NO: 437 - protein, 390 aa, Hevea brasiliensis
MSWWWAGAIGAAKKKFDEDDAPRSFQSVGLVLGVTGIVGNSLAEILPLSDTPGGPWKVYGVARRPRPNWNADHPVEYVQCDISDQAETQAKLSQLTDVTHIFYVSWANRSSEAENCEINGSMLRNVLQAVIPNAPNLGHICLQTGTKHYVGPFELFGKIQPHDPPFTEDLPRLNVPNFYYTLEDILFEEAAKKEGLTWSISRPDQIFGFSPYSLMNIIGTLCVYAVICKHEGLPLLFPGTKQAWNCYSIASDADLIAEQHIWASVDPYARNEAFNCNNGDVFKWKHFWKILAEEFGIEKYGFEEGEKRLSLVEIMKDKGPVWEEIVREYQLHPTKLEEVGVWWFADLILGGEAVISSMNKSKEHGFLGFRNSKNSFIYWIDKMKAYKIVP

SEQ ID NO: 438 - protein, 389 aa, Dorcoceras hygrometricum
MSWWWAGAIGAAKKKFDEDENPAKHQSVALIIGVTGIVGNSLAEILPLSDTPGGPWKVYGVARRPRPAWNDDNPTNYIRCDVSDADDVQEKLGSLTDITHVFYVTWASLSTEAENCEVNGRMLSNVLDVVIPNCPGLKHISLQTGRKHYFGPVESFGKIAIHDPPFDESLPRLDHINFYYTLEDILFAVVGKKEGLTWSVHRPGTIFGFSPYSLMNLVGTLCVYAAICKHEGMPLRFPGSKSAWDGYSDCSDADLIAEHHIWAAVDPYAKNEAFNVSNGDVFKWKSFWKVLAEQFDVEYAEFQEGQKLKLQEVMKDKGSVWDQIVRDNGLTPTKLEDVGNWWFSDLVLSSEGLLDTMNKSKEHGFLGFRNSKNSFVSWIDKVKAYKIVP

SEQ ID NO: 439 - protein, 390 aa, Brassica napus
MSWWWAGAIGAAKKKFDEDEPTQTYESVALIIGVTGIVGNSLAEILPLSDTPGGPWKVYGVARRPRPTWNADHPIDYIQCDVSDEEDARSKLSPLRDVTHVFYVTWTNRSVESENCKVNGSMLRNVLRAVVPNAPNLRHVCLQTGTKHYLGPFDSVGKAVDRHEAPFTEDMPRLKVDNFYYTLEDVLSEEIKMKESVTWSVHRPNTIFGFSPYSLMNIVGTLCVYAAICKHEGSKLVFPGSKEAWEGFTTASDADLVAEQQIWAAVDPYAKNEAFNCSNADVFKWKHLWKILAEQFGIEEYGFEEGKNVGLVEMMKGKERVWEEMVKENQLQVKKLDEVGVWWFADVVLGVDGMIDSMNKSKEYGFLGFRNSNNSFISWIDKYKAFKIVP

SEQ ID NO: 440 - protein, 389 aa, Ziziphus jujuba
MSWWWAGAIGAAKKKFDSDNAPAKHHSVALVVGVTGIVGNSLAEILPLSDTPGGPWKVYGVARRPRPPWNADHPIHYIQCDVSDSQQTNEKLSDLTDVTHIFYVAWTSRPTEAENSDINGRMLLNVLNTVIPIAPNLLHICLQTGRKHYMGPFELLGKIKPHEPPFHEDLPRLKVPNFYYTQEDILLAEVNKKQGLTWSVHRPGVIFGFSPYSLMNIVVSLCAYASICKHQGQALKFPGSQAAWDGFCDASDADLIAEHEIWAAVDPFAKNQAFNCSNGDVFKWKHLWEVLAEKFGLEYSAEFDVKLTLEEMMKGKDWVWDEIVKEKNLVPTKLEEIGGWWFADIILGLNELHLDSMNKNKEYGFVGFRNSKTSFGSWIDKIKSYRIVL

SEQ ID NO: 441 - protein, 394 aa, Punica granatum
MSWWWAGAIGAAKKKFEEDDAPKSFQSVGLVVGVTGIVGNSLAEILPLADTPGGPWKVYGVARRPRPSWNADHPVEYIQCDISDPQDAESKLSVLTDVTHIFYVTWTNLIAEVENCEVNGRMLRNVLRAVLPNAPNLCHVCLQTGQKHYIGNFEDMATGKVRPHEPPYTEDLPRLDCPNFYYTLEDILYEEVAKKDGVSWSVHRPPVIFGFSPYSLMNMVGSLCVYAAICKHEGTPLKFPGTKETWECYCIAGDADLIAEQQIWAAVDPYARNEAFNCSNGDVFRWKHFWKVLAEQFGIEEYGFYKKEGKLGLEEAMKGKEKVWEEIVRENQLQPTKLEEVGIWWFVDLVLSGDAGLDSMNKSKEHGFLGFRNSRNSFIYWIDKVKGYKIVPGA

SEQ ID NO: 442 - protein, 391 aa, Capsicum baccatum
MSWWWAGAIGAAKKKFEEDDAPPKYDSVALIIGVTGIVGNSLAEILPLADTPGGPWKVYGVARRFRPSWNADHPIEYVQCDISNPEDTQSKLSVLTDVTHVFYVTWANRSTEVENCEINGKMFSNVLNVIIPNCPNLRHICLQTGRKHYLGPFELFGKVGKVGHDSPFHEDLPRLDAPNFYYVLEDILFKAVAKKEGLTWSVHRPGTIFGFSPYSLMNIVGTLCVYAAICKHEGLPLKFPGVKAAWDGYSDCSDADLIAEHQIWAAVDPYAKNEAFNVSNGDVFKWKHFWKVLAEQFGVEPAEFDEGKRCTLTEMMKDKGTVWDEIVKENGLVPTKLEEVGVWWFVDLMLAGDCPLDTMNKSKEHGFLGFRNSQKAFISWIDRVKAYKVVP

SEQ ID NO: 443 - protein, 389 aa, Carica papaya
MSWWWAGAIGAAKKKFEEDDAPRSFQSVALVVGVTGIVGNSLAEILPLSDTPGGPWKVYGVARRPRPTWNADHPIEYIQCDVSDMEETRAKLSPITDITHIFYVAWSNRSTERENCEVNGAMLRNVLQVVIPNSPNLSHICLQTGAKHYVGPFETLGKIQFHDPPFTEDMPRLDTPNFYYTQEDILFEEVEKKENLTWSIHRPLVIFGFSPYCMMNMVGILCVYAAICKHEGSPLIFPGSKASWDSYSTVSDADLIAEQQIWAAVDPYAKNEAFNCSNGDVFKWKHFWKVLAEQFGIEEYGFNEGKSFKLEEAMKDKGSVWDEIVRENQLYPSKYEEVAVWWFVDVIFGMEGVLGCMNKSKEHGFLGFRNSKNSFISWIDKMKGYKIVP

SEQ ID NO: 444 - protein, 391 aa, Gossypium hirsutum
MSWWWAGAIGAAKKKFEEDEAPRSFQSVGLIIGVTGIVGNSLAEILPLSDTPGGPWKVYGVARRPRPNWNADHPIEYIQCDISDPNDTESKLSQLTDVTHIFYVSWINRTSEAENCEINGSMLRNVLHSVIPNAPNLRHICLQTGAKHYLGPFELLGKIQPHDPPFTEDLPRLNAPNFYYHQEDILFEEIEKKEGLTWSVHRPGVIFGFSPYSLMNLVGSLCVYAAICKHEGKPLHFPGSKAAWNCYFEASDADLIAEQHIWAAVDPYAKNEAFNVTNGDVFKWKHLWSVLAEQFGIEEFGFVEGENRGMEEMMKEKEGVWEEIVKENQLQKTSLQVVGNWWFTDTIFLAPLQMPLLSMNKSKEHGFLGFRNSRNSFVTWIDKMKAYKIVP

SEQ ID NO: 445 - protein, 394 aa, Cucumis sativus
MSWWWAGAIGAAKKKFEEDEPPRSFESVALVIGVTGIVGNSLAEILPLSDTPGGPWKVYGVARRPRPAWNADHPIEYIQCDVSDPQDAETKLSQLADVTHLFYVTWTNRTTEIENCEANVKMLRNVLRSVIPNAPNLRHICLQTGTKHYVGSFESIINKSSQRHDPPFTEDLPRLECPNFYYKQEDLLWEEIEQSQKKDLTWAVIRPNLIFGFSPFSLMNVVGTLCVYAAICKHEGRPLKFPGNKLAWEDFQVASDADLIAEQHIWTAVDPYSKNEAFNCNNGDVFKWKHFWKVLAEQFNIEEYGFDEEGESLTLVDLMKDKSDVWDEIVKENQLQQTKLEEIGTWWFVDSIFSMSGNIDSMNKSKEHGFLGFRNSKNSFISWIDKIKAFKIVP

SEQ ID NO: 446 - protein, 399 aa, Citrus clementina
MSWWWAGAIGAAKKKFEENERQPQPQPQDYQHVGLVIGVTGIVGNSLAEILPRQDTPGGPWKVYGVARRPRPDWNADHPIEYIQCDVSDQDDTQAKLSKLTDVTHIFYVTWASRPTEAENCEVNGAMLRNVLRSVIPNAPNLRHVCLQTGGKHYVGPFESFGKIRPHDTPFTEDLPRLNVTNFYYTQEDILFEEVEKRKGPLSLTWSVHRPHIIFGFSPYSMMNVVGTLCVYAAICKHEGVPLLFPGSKDCWEGYSVASDADLIAEQQIWAAVDPYARNEAFNCSNGDVFKWKHLWKVLAEQFEIENYGLPQEGERVRLEEIMRGKEGVWEQIVKENQLQLTKLSEVAVWWFADMMLDGGFLLLDSMNKSKEHGFLGFRNSKNSFVNWIDKMKTYRIVP

SEQ ID NO: 447 - protein, 387 aa, Catharanthus roseus
MSWWWAGAIGAAKKKFEFDDAPPKYQSVGLILGVTGIVGNSLAEILPLSDTPGGPWKVYGVARRPRPSWNADHPIEYIQCDISDPEETESKLSKLTDVTHVFYVTWTNKSTEVENCEANGKMFRNVLNAIIPNCPNLQHICLQTGLKHYFGPFEFFGKAAQETPFHEDLPRLDVPNFYYTLEDILFEEVQKKEGLSWSVHRPGTIFGFSPFSLMNLVGTLCVYAAICKHEGLPLKFPGCKEAWEGYSMCSDADLIAEQQIWAAVDPYAKNEAFNVSNGDVFKWKHFWKVLAEQFGLECAEYEGDKVSLEEMMKDKEAVWEEIVRENGLLPTKLEEVGGFWFVDFIFGVEYPLDSMNKSKEHGFLGFRNSKNAFISWIDKAKAYKIVP

SEQ ID NO: 448 - protein, 389 aa, Fragaria vesca
MSWWWAGAIGAAKKKFGPDDEPPKYQSVALVLGVTGIVGNSLAEILPLPDTPGGPWKVYGVARRPQPQWNADHHIQYIQCDLSDSEQTETELSQLTDVTHIFYVTWASKPSEAENCEANGKMLSNVLNAVIPNAPNLQHICMQTGRKQYVGPFEMFGKIEPHEPPYVEDTSRLDCPNFYYVMEDILFEEVKKKEGLTWSVHRPGIIFGFSPYSLINTIGSLCVYAAICKHEGQPLRFPGSKGTWEGFWDASDADMIAEHEIWAAVEPYAKNEAFNCSNGDVFRWKHLWGILADQFEVESGGVDEELRVEEMMKDKGPVWDEIVRKHDLVPSKLEEVGNWWLVDIIFRIGVDSSMDSMNKSREHGFVGFRNSKTSFLSWIDKMKSYRIVP

SEQ ID NO: 449 - protein, 405 aa, Prunus avium
MSWWWAGAIGAAKKKHEDDDHEAPRSFKSVGLVIGVTGLVGNSLAEILPLHDTPGGPWKVYGVAPRPRPDWSVDHPVEYIQCDISDPIDAQTKLSQLTDVTDIFYVTWTSRSTEADNCEANGALLRNVLSSVIPNAPNLRHVCLQTGTKHYDGPFEAYGKVAPHDTPSTEDLPRLNVPLFYYNLEDVLFEEVEKKEGLTWSVHRPGLIFGFSPYSMLSIVSMLCAYAAICKQEGLALRFPGSKAGWDSYSEASDADLIAEQQIWAAVDPYAKNEAFNINNGDVFKWKQLWKVLAEEWDVFKWKQLWKVLAEEFEIEEYGFDEGFSLVEMMRDKGGVWEEIVGENQLRHTKLEELGLWEVVEVVLGGGAELSSMNKNKEHGFCGFRNSRNSLVYWIDKMKAHKIVP

SEQ ID NO: 450 - protein, 389 aa, Salvia rosmarinus
MSWWWAGAIGAAKKKIDEDEPPPNYQSVALVVGVTGIVGNSLAEILPLSDTPGGPWKVYGVARRPRPSWNEDHPINYISCDVSDPDDVKSKLAPLTDITNIFYVTWTNRSTEEENCEANGKMLKNVLNVVIPNCPNLKHICLLTGRKHYLGPFNSVWKIQVPDPPFTEDLPRLDCPNFYYTQEDILFEEVQKKEGLTWSVHRPGVIFGFSPYSMMNLVGTLCVYAAICKHEGAVLRFPGCKDAWDGYSDCSDADLIAEHQIWAAVDPYAKNEAFNVSNGDVFKWKHFWKVLAEQFGLECGEYEEGKEVKLQELMKEKGPVWDEIVRENGLSCTKLEDVGKWWFSDLILEHAGMLDTMNKSKEHGFLGFRNSKNSFISWIDKLKAYKIVP

SEQ ID NO: 451 - protein, 425 aa, Elaeis guineensis
MSWWWAGAIGAAKKKIDEDSGGGGGGGAPKFQSVGLVIGVTGIVGNSLAEILPLSDTPGGPWKVYGVSRRPLSVSFRPLTEGLAVEHIQCDVSDPDDALAKLSPLTDVTHVFYVAWANRIVEAENREVNSALLRNVLAAVLPNAPNLQHVCLQTGRKHYLGSFESLGKVKAHEPPFREDLPRLDCPNFYYDLEDILFEEMAKRDGTVTWSIHRPTTIFGFSTYSLMNLVGSLCAYAAICRREGAPLKWPGSRVVWEDFSDASDADMIAEHQIWAAIDPYAKNEAFNCSNGDLFKWKHLWPLLAREFGVEWVGYEGEEQRFKLVDAMKEKEGLWEEIVAEHELAPTRLEEVGNWWFVDAVFGVEEVHLDSMNKSKEHGFLGFRNTVVSTIMSHCILHLEPWDPNILTLQVDHRSECIYEREGLTFY

SEQ ID NO: 452 - protein, 391 aa, Erythranthe guttata
MSWWWAGAIGAAKKKIEEDEPPQKHEGVALIVGVTGIVGNSLAEILPHSDTPGGPWKIYGVARRPRPTWNADNPVNYIQCDISDPEDTRVKLSPLTDITHVFYVTWANKSTEAENCEVNGKMLQNLLDAVIPNSPNLKHICLQTGRKHYIGPFESFGKNIPTHDPPYTEDLPRLNHINFYYTLEDILFAEVEKKEGLTWSIHRPGNIFGFSPYSMMNLVGTLCVYAAICKHEGVPMKFPGSKIAWEGYSDCSDADLIAEHQIWAAVDRFAKNEAFNVSNGDVFKWKHFWKALAEHFGVEFVEYEEGGEEVKLEELMKDKGSVWDEIVRENGLTVTKLEEVGTWWFSDLILGGECSLDSMNKSKEHGFLGFRNSKSSFVSWMYKVQACKIVP

SEQ ID NO: 453 - protein, 389 aa, Helianthus annuus
MSWWWAGAIGAAKKKLDDEDAPPKYQSVALIIGVTGIVGNSLAEILPLSDTPGGPWKVYGVARRPQPQWNSDHPIEYIQCDVSDPDETLTKLGCLQDVTHLFYVTWANQATESENCEINGKMFQNVLDAVIPDSPSLQHICLQTGKKHYWGPFELYGKASHDTPYHEDLPRLDVPNFYYTLEDILFESVGRKEGLTWSIHRPGLIFGFSPYSLMNLIGALCVYATICKHEGVPLKFPGTKEAWESYHDCSDADLIAEQHIWAAVEPHAKNEAFNISNGDVFKWKHLWKVLAEQFEVENGGFDEGGERVSLVEMMKDKGGVWDEIVREKGLVSTKLEEVAAWWFADGMLGIEGVLDTMNKSKEHGFFGFRNSKSSLVSWIEKMKGYKIVP

SEQ ID NO: 454 - protein, 390 aa, Genlisea aurea
MSWWWAGAIGAAKKKLDEDDAPPKHQSVALIIGVTGIVGNSLAEILPLSDTPGGPWKVYGVARRPRPPWNEDNPITYIQCDVSDPEDTQAKLSPLSDVTHLFYATWANKSTEAENCEINSRMFQNVLDCIIPSSPSLKHICLVTGRKHYIGPFESFGKIEPHDPPFTEDLPRLDHINFYYDLEDILFEQVKKKEGLTWSVHRPGTIFGFSPHSMMNIVGTLCVYTAICKHEGVPLRFPGVKAAWEGYSDCSDSDLIAEHQIWAAVDPYAKNEAFNVSNGDVFKWKHLWKVLADQFGVENGGFVEEGERATLADLMKDKGPVWDEIVRENGLLPCELKDVGLWWFVDLMLGGEALLDSMNKSKEHGFLGFRNSKNSFASWIDKVRAYKIVP

SEQ ID NO: 455 - protein, 351 aa, Arabidopsis thaliana
MSWWWAGAIGAAKKKLDEDEPSQSFESVALIIGVTGIVGNSLAEILPLSDTRSKLSPLTDVTHVFYVTWTNRESESENCEANGSMLRNVLQAIIPYAPNLRHVCLQTGTKHYLGPFTNVDGPRHDPPFTEDMPRLQIQNFYYTQEDILFEEIKKIETVTWSIHRPNMIFGFSPYSLMNIVGTLCVYAAICKHEGSPLLFPGSKKAWEGFMTASDADLIAEQQIWAAVDPYAKNEAFNCNNADIFKWKHLWKILAEQFGIEEYGFEEGKNLGLVEMMKGKERVWEEMVKENQLQEKKLEEVGVWWFADVILGVEGMIDSMNKSKEYGFLGFRNSNNSFISWIDKYKAFKIVP

SEQ ID NO: 456 - protein, 390 aa, Lupinus angustifolius
MSWWWAGAIGAAKKKLDEEEAPPTSFQNVGLVIGVTGITGNSLAEILPLADTPGGPWKVYGVARRPRPSWNADHPIQYIQCDISDPNDTQSKLSVLTDVTHVFYVAYTNLPTEAESCQVNGDMLRNVLRSVIPNAPNLRHVSLQTGCKHYIGPFELIGKIKSHEPPHTEDLPRLDAPNSYYTQEDILFDETEKIEDLTWSVHRPQIIFGFSPYSSINVIRNLSIYAAICKHERVPLKFPGTKDAWECYAIASDADLIAEQHIWAAVDPYARNEAFNCSNGDLFKWKHMWPVLAEQFGIEDYGFEEGSKLKLSEFMKDKGSVWDEIVKENQLLPMKLEEVSDWWFLDLLFSIESPMDSMNKSKEHGFLGFRNSKNSFITWIDKAKTYKIVP

SEQ ID NO: 457 - protein, 405 aa, Ananas comosus
MSWWWAGAIGAAKKKLDENAEAAAAAVPTRYESVGLVVGATGIVGTSLLEILPLSDTPGGPWKVYAVSRNPRPSWSPPICDGPSVEHVQCDLSDPDDAAAKLSPLADVTHVFYVAWTSRPSEDENRAANTAMLRNALSVLVPAAPNLQHVCLQTGRKHYVGPFEALGRVPAHDPPFHEDLPRLDVPNFYYDLEDALLDELSKRPSSSSPVSWSVHRPSVIFGFSPRSAMNLVETLCVYAALCRREGAKLRWPGGRVAWEGFSDASDADLVAEHQIWAAVDPFAKNEAFNCSDGDVYKWKHLWPILADQFGVDWVGYEGEEKRFKLAEAMEGKEQLWAEMVTEHELTPTRLDEVGNWWFADIMFGYDAEHLDSMNKSKEHGFLGFRNTVSSFNTWIDKMKAYKIVP

SEQ ID NO: 458 - protein, 395 aa, Beta vulgaris
MSWWWAGAIGAAKKKLEDSDDVSTTSINYQSVALIVGVTGIVGNSLAEILPLSDTPGGPWKVYGVARRPRPNWNAEHPIEYIQCDISDKDDVVLKLSPLTDVTNIFYVCWANCVTEAENCKINSMMFQNVLNAVVPNAPNLKHICLQTGMKHYTGAFEYWGKVEHLLDPPYSEDMPRLELPNFYYDLEDILYAQVAKKEDITWSVHRPGCIFGFSPYSVMNVLGTLCVYAAICKHEGIPFRFPGSKIIWESYSQASDADLIAEHQIWAAVDPYAKNEAFNCSNGDVFKWKHLWQVLGEQFGVEVAEFDERVGGFSLAEWIKGKDSVWEEIVKENDLVATKLEEVGTWQFVDMAFSWNWPLDTMNKSKEHGFLGFRNTKNSLIYWVDKMKAYKIVP

SEQ ID NO: 459 - protein, 394 aa, Gossypium raimondii
MSWWWAGAIGAAKKKLEEDETPKSFQSVALVVGVTGIVGNSLAEILPLSDTPGGPWKVYGVARRPRPHWHAEHRIEYIQCDVSDPKDTESKLSQLTDVTHIFYVSWVNRTTETDNCEINGSMLRNVLHTLILNAPNLRHICLQTGAKHYVGSFEYITSGKIEPHDPPFTEDLPRLNTPNFFYVQEDILLQEIEKKQGLTWSVHRPNTIFGFSPYSLMNIVGTLCVYAAICKYEGKPLLFPGNKVTWESYSEVSDADLIAEHQIWAAVDPYAKNEAFNVNNGDIFKWKHLWKVLAEQFGIEKYGLEEGKNVGLKEMMKGKESVWEKIVNEKGLQKTRLEEVGFWWFVDILLSMMPMESPILCMNKSKEHGFLGFRNSKSSLITWIDKMKAFKIVP

SEQ ID NO: 460 - protein, 390 aa, Citrus sinensis
MSWWWAGAIGAAKKKLGEDDERNVGLVIGVTGILGNSLAEILPRPDTPGGPWKVYGVARRPRPHWNADHPIEYIQCDVSDPQQTQTKLSQLTDVTHIFYTTWASSPTEVENCQINGAMLRNVLHSVIPSAPNLRHICLVTGAKHYLGPFEVATRRMKSHPLEPPFTEDLPRLNMPNFYYTQEDILFEEVEKREGLTWSVHRPHLVFGFSPYSLMNVVGTLCVYAALCKHEGIPLLFPGTKDCWEGFSVASDADLIAEQQIWAVVDPRARNEAFNCSNGDVFKWKHLWKVLAERFGIEKYGFEEGGETVRLEEILKGKESVWEEIVKENQLRPTKLNEVAAWWIADVTFDIGAGMLVSMNKSKEYGFLGFRDSNKSFATWIDRLKHYKIVP

SEQ ID NO: 461 - protein, 389 aa, Amborella trichopoda
MSWWWAGAIGAAKKKNDEDEGPVKYQSVALVVGVTGIVGNSLAEILPLSDTPGGPWKVYGVGRRPCPKWSEDHPIEYIQCDILNLEETTAKLSPLTDITHVFYVTWADRISEAENCDVNGHMFRNVLDALLPNAPNLQHICLQTGRKHYLGPFEAIGHVKPHEPPYQEDVPRLPCLNFYHTLEDILFEAAEKKEGLTWSVHRPTVIFGFSPYSLMNLVGSLCVYAAICKHEGLPFRFPGSKAQWEGFSDASDADLIAEQHIWAAVDPHAKNEAFNCANGDVFRWKQLWKILGEQFGLELVEYEGKGFSLVEAMKEKGPVWDTIVKENELSETKLQEVAQWWFADVMLDNEGVGLDSMNKAKEHGFLGFRNTLTSFSSWIDKMKAHKIVP

SEQ ID NO: 462 - protein, 412 aa, Musa acuminata
MSWWWAGAIGAAKKKTTGDDADAPAARYQSVALVVGATGIVGSSLYDILPLADTPGGPWKVYGVSRRPPRPSLLSPNIADGVGLPVVHVPCDVADPADALAKLSPLGDVTHIFYAAWCRRSTAAETRATNAAMLRNVLDAVLPAAPNLQHVCLQTGRNHYLGPYGPAGGVVAEVGPRHDPPHDPPFPENTPRLAIPNFYYELEDVLLEELAKKERAVTWSVHRPTTIFGFSPCSLMNLVCSLCVYASICRKEGVPLRWFGSEEAWYGFSDASDADLVAEHQIWAAVDPYAKNEAFNCSNGDVFKWKHLWPVLAEQFGVPAVGYTGYDGRFKLEDAMKGKEAVWEDIVRENELVPTALDEVGHWWYADAVLGLEFEHLDNMNKSKEHGFLGFRNSVTSFNTWIDKLRAYKVVP

SEQ ID NO: 463 - protein, 356 aa, Zostera marina
MSWWWAGAIGAAKKKVDDDEAETERIPIRYESVGLVIGATGIVGNSLVDILPLPDTPGGPWKVYAVARRPRPTWNLTDHPVEYIQCDVSDVTDVQAKLSPLTDVTHIFYVTRAPGKTEEENCAVNGQMLRNVLDAVIPNSVRLQHISLQTGRNHYVGPPELSDEIEIHDQPYHEELPRLNGPNFYYTQEDILARYEGVPFRFPGGKHAWEGFSDASDADLIAEHQIWASVDPYAKNEAFNCSNGDIFSWKVMWKVLSEQLELECVGYEGEEKRFSLEEAMKGKEGIWEAMVKENGLSETSLSEVGNWQFVDRCLNSEKTHLDSMNKSKEHGFSGFRNSINSLIYWVDKVKTYRIVP

SEQ ID NO: 464 - protein, 389 aa, Cephalotus follicularis
MSWWWAGAIGAAKKKYEEDEQPRSYQSVGLVVGVTGIVGNSLAEILPLSDTPGGPWKVYGVARRPRPDWNADHPVDYIQCDVSDPTETQSKLSTLTDITHIFYVTWASRSTEVENCEVNGAMFRNVLRAVIPNAPNLRHICLQTGGKHYLGPFELFGKIQAHDPPFTEDLPRLDAPNFYYTLEDVLFEEVEQKEDVSWSVHRPGAIWGFSPYSLMNIIGTLCVYAAICKHEGKPMLFPGSKAAWECYSIASDADLIAEQQIWAAVDPYARNEAFNCFNGDVYRWKQFWKVLAEQFEIEEYGFEEGKNVGLVEMMKGKEAVWEEIVKENQLQDTKLKDVGVWWFVDLALGGEGTMLCMNKSKEHGFLGFRNSKNSLINWVDKMKAYKIVP

SEQ ID NO: 465 - protein, 394 aa, Ipomoea nil
MSWWWAGAIGAAKKRFGEEDDAPPKHQSVALILGVTGIVGNSLAEILPLADTPGGPWKVYGVARRPRPAWNADHPIQYIQCDISAEEDAQSKLSVLTDVTHVFYVTWAHRPTELENCEVNRKMLGNVLNAVVPNSPDLKHICLQTGQKHYWGPFELSGKLSHDPPHHEDLPRLDAPNFYYVLEDLLFDEVKKKKEEGLTLTWSVHRPGTIHGFSPYSMMNIVGTLCDYAAICKHEGAPLRFPGIKDSWDGYSICSDADLIAEQEIWAAVDPYAKNEAFNVSNGDVFKWKHLWKILAEQFEVEAGEFEEEGERLTLQEMMKEKGPVWDEIVEKNNLQPTKLEDVGVWWFADVILGICYPLDSMNKSKEHGFLGFRNTHKAFISWIDEMKAHKIVP

SEQ ID NO: 466 - protein, 391 aa, Ricinus communis
MSWWWAGAIGAAKKRVEDDDPQPKYQSVALIIGVTGIVGNSLAEILPLADTPGGPWKVYGVARRPRPIWQADHLIEYIQCDVSNEEQTLEKLSTLKDTTHIFFVAWASEPTEAENCIVNGTMLRNVLRAVIPNAENLQHVCLQTGRKHYVGSFESIWKIPSHESPFHEDLPRLNDINFYYTLEDVLFDETQKKEGLTWSIHRPGVIFGFSPCSLINMVGTLCVYAAICKHQGLPLTFPGNRDAWDGYWDASDADLIAEHQIWAAVDPYAKNEAFNCSNGDVFKWKHLWKELAEQFEIENYGFEEENDKRPSLVEMMKNKGPVWDEIVKEKELLPTRLEEVAAFWLVDLLLQGASLLDSMNKSKEHGFLGFRNSNKSFASWIDKLKAQRIVP

SEQ ID NO: 467 - protein, 400 aa, Elaeis guineensis; identical to SEQ ID NO: 382

SEQ ID NO: 468 - protein, 400 aa, Citrus clementina; identical to SEQ ID NO: 383

SEQ ID NO: 469 - protein, 410 aa, Musa acuminata
MSWWWAGAIGAARKKLEDDSSSTVPKYESVAIVIGATGIVGTSLVDILPLADTPGGPWKVYAVSRRPPNSAILPYSYSPADAEAPVAADTLRVQHIQCDVLDAADAVAKLSPLTDVTHLFYVAWANRLTEAENRVVNSAMLRNVLSAVVPSAPNLCHVCLQTGRKHYVGPFEAVGKALAHDPPFREDLPRLPVPNFYYDQEDILFDELSKKEGAVTWSIHRPTTIFGFSPTSLMNLIGTLCVYAAICRKEGAPLKWFGSRTTWDGFNDASDADLIAEQQIWAAVDPYAKNEAFNISNGDLFKWKHLWAALADQFGLESVGYEGEASRFKLEDAMRGKEAVWAEIVAENELVPTKLEEVASWWFADVVLGLELAHLDSMNKSKEHGFLGFRNTVASFNSCIDKMKAFKIVP

SEQ ID NO: 470 - protein, 390 aa, Theobroma cacao
MSWWWAGAIGAARKKLEEHDEPSKYKSVALVIGITGIVGSSLAEILPFSDIPGGPWKVYGVARRPRPAWTNALPIDYIQCNISNEEETQEKLSKLKDVTHIFYVAWAKKSSEAENCMVNGTMLRNVLKAVIPNAPKLKHVCLQTGRRHYTGPFDSVGKVQPHDPPFREDLPRLPVLNFCYTLEDVLFEEVKKKDGLTWSVHRPGVIFGFSPCSLMNIVGSLCVYAAICKHEGKPLRFPGSRQAWDGYWDASDADLIAEHQIWAALNRHAKNEAFNCSNGDVFKWKDLWKVLAKQFGIEDYGFHESDERHSLVEMMKDKGPLWDEIVREKGLVPTKLNEVGAWRFADAVLSGKSLLDSMNKSKEHGFVGFRNSKTSFNSWIDKMKTHKIVP

SEQ ID NO: 471 - protein, 388 aa, Gomphocarpus fruticosus
MSWWWAGAIGAARQKKTDDYTALTKFQSVGLIIGVTGIVGNSLAEILPLSDTPGGPWKVYGVARRPRPAWNADHPIEYVQCDIANREDTEEKLSKLTDVTHVFYVTWANKSNEIENCEVNGKMLKNVLDVLVPNCPKLQHVCLQTGGKHYCGPFELYGKVGHEPPFTEDLPRLDVPNFYYTLEDVLFEAVGKKEGLTWSVHRPGNIFGFSPYSLMNLVGTLCVYAAICKHDGVPLKFPGCKEAWEGYSVCSDADLIAEHQIWAAVDPFAKNEAFNVSNGDVFKWKHFWKVLAEQFDVECGEYEGEKLSLEDMMKDKGGVWDEIVAENGLAPTKLEEVGLWWFGDICLGYECALMSMNKSKEHGFLGFRNSKNAFISWIEKMKAYKIVP

SEQ ID NO: 472 - protein, 391 aa, Lupinus angustifolius
MSWWWAGAIGANKKKSNEEEEEPPTSFNNVGLVIGVTGIVGNSLAEILPLADTPGAPWKLYGVARRPRPPWNSGHSINYIQCDISDPDDAQSKLSVLTDVTHIFYVSWSQQPTEAENCNVNGAMLRNVLTSVIPNAPNLRHVSLQTGAKHYLGPFELFGEINPHDPPFTEDLPRLEVPNFYYTQEDILFEEVNKKENLTYSIHRPHFIFGFSPYSFMNLIGTLCVYAAICKHEGLPLKFPGTKEAWECYSTASDADLIAEQHIWAAVDPNARNEAFNCSNGDVYKWKNLWEVLAEQFEIEEYGFEEGCDLRLEELMKDKGHVWDEIVKENELLPTKLEEIGEWWFSDLMLGMEPVLDSMNKSKEHGFLGFRNSKNSFITWIDKNKAYKIVP

SEQ ID NO: 473 - protein, 374 aa, Brachypodium distachyon
MSWWWAGAIGAVKKRQDESAAAAEPSFQSVALVVGSTGIVGTSLLDILPLQDTPGGPWKVYALSRRPLPPWSPPPSPAVTHLHLDLADSAAVADALTPLTDITHVFYVAWSNHPTEAQNREANSAMLRNVLSVVVPNCPALVHVCLQTGRKHYIGPFEAIGKIPAPDPPYTEDMPRLDYPNFYYDQEDVLFDEVSRRGGAVSCLCVYAAICRKEGATMRWPGSKVAWEGFSDSSDADLIAEHEIWAAVDPFAKNEAFNCSNGDLYKWKQLWPMLADHFEVEWAGYDGEENRFMLTQAMAGKEAVWAEILQENELIRTELEEITNWWFVDALFNVETQHLDSMNKSKEHGFLGFRNTTNSFNTWIEKMKVFKIVP

SEQ ID NO: 474 - protein, 396 aa, Oryza brachyantha
MSWWWAGAIGAVKKRQEENAAATEPSFQSVALVLGSTGLVGTSLLDILPLQDTPGGPWKVYAVSRRPLPPWSPPDSPAVTNLHLDLADPAAVAEALTPLTDITHVFYVAWSPQPTEAQNLEVNAAMLRNVLSVVVPNCPALVHVCLQTGRKHYIGPFEAIGKIPVPDPPFAEDMPRLNCPNFYYDQEDVLFEEVSRRDGAVSWSVHRPTTIFGFSPRSAMNVVGSLCVYAAICRKEGAVLRWPGTRVAWEGFSDASDADLIAEHEIWAAVEPFAKNEAFNCSNGDLYKWKLLWPMLADQFGVEWSGYEGEESSFKLEDAMSGKEAVWAEIVMENGLVETELKEITNWWFVDAVFGVQSEHLDSMNKSKEHGFLGFRNTVNSFNTWIEKMKVFKIVP

SEQ ID NO: 475 - protein, 389 aa, Catharanthus roseus
MSWWWAGAIGVAKRKLDDFDAPPKYQSVGLILGVTGIVGNSLAEILPLSDTPGGPWKVYGVARRPRPSWNADHPVEYIQCDISDPEDAQSMLSKLTDVTHVFYVTWASKSTEVENCEVNSKMFRNVLNAIIPNCPNLQHICLQTGLKHYLGPFELFGKAAVAHEPPFHEELPRLDVPNFYYTLEDILFEEVQKKEGLTWSVHRPGNIFGFSPFSLMNLVGTLCAYAAICKHEGVPLRFPGCKEAWQGYSMCSDADLIAEHQIWAAVDPYAKNEAFNVSNGDVFKWKHFWKVLAEQFGAEYAEYQGERLSLQELMKDKGPVWENIVRENGLVPSKLEEVGVWWFADLVLSVECPLDSMNKSKEHGFLGFRNSKNAFISWIDKAKAYKIFP

SEQ ID NO: 476 - protein, 390 aa, Populus euphratica
MSWWWAGALGAARKQSENGDTSRGHQSVALVVGVTGIVGNSLAEILPLSDTPGGPWKVYGVARRPRPNWNLDHPVEYIQCDISDTAETQAKLSQLTDVTHIFYVTWALRFTEAENIQANNLMFRNVLQAVIPNAPNLKHVCLQTGLKHYVGPFELVGKIEPHDTPYTEDLPRLNAPNFYYDLEDILAEEVATKEGVTWSVHRPHTIFGFSPYSLMNMMGTLSVYAAICKHEGMPLLFPGTESVWNAYSIASDADLIAEQEIWAAVDPNAQNEAFNIHNGDVFKWKHLWKVLAEQFGIEKYGLPESGKKVSLTELMKDKGAVWEKIVKDNQLLPNKLEEVGVWWFADFVLGAESIISCMNKSKEHGFLGFRNSKNSLISWVDKLKAHKIVP

SEQ ID NO: 477 - protein, 390 aa, Catharanthus roseus
MSWWWAGAVAAARKRFNEDEAPKNFQSVALIVGVTGIVGNSLAEILPLSDTPGGPWKVYGVARRPRPAWNADHPVEYIQCDVYNSDETQAKISPLTDVTHIFWTTWANRPTEAQCCEVNGTMFQNVVNALLPNAPNLSHICIQTGHKHYIGPFEAFGKVKPHDTPFIEDVPRLDAPNFYYTLEDIAFDACNKKEGLTWSVHRPAVIFGFSPLSMMNLVGTLCVYAAICKHENVPLTFPGTKAAWNCYSVASDADLIAEHQIWAAVDPYAKNEAFNCSNGDIFKWKHLWKVLAEQFEVDYVEFDENQEFVSLSDRMKDKGSVWDEIVEKNQLIPTKLEEVATFWFADLILGFECMLDSMNKSKEHGFLGFRNTAKSLVSVVDKMKAHKIVP

SEQ ID NO: 478 - protein, 391 aa, Prunus mume
MSWWWAGAVGAAKKKFDEDEAPRSPESVGLVIGVTGIVGNSLAEILPISDTPGGPWKVYGVARRPRPNWNADHPVEYIQCDISDADDAKAKLSPLSDVTHIFYVTWTNRSTEAESCEANGAMFRNVLNSVIPNAPNLRHVCLQTGAKHYVGPFEAFGKIQPHESPFTEDLPRLDYPNFYYTLEDLLFAEVEKKDDLTWSVHRPDAIFGFSPYSMMNIVGTLCVYAAICKHERVPLKFPGSKAAWNCYSVASDADLIAEQHIWAAVDPYAKNEAFNINNGDVFKWKHVWKVLAEQFGIEEYGIDEEEGAKLSLVELMKGKERVWEEIVKENQLQPTRLEEVGVWWFVDVWLGGEGLLCSMNKSKEHGFVGFRNSRNSFVTWIDKMKAFKIVP

SEQ ID NO: 479 - protein, 395 aa, Ziziphus jujuba
MSWWWAGAVGAAKKKFGEDEAPTSFQSVGLVVGVTGIVGNSLAEILPLADTPGGPWKVYGVARRPRPAWNADHPIEYIQCDISDPQQTQAKLSSLTDVTHIFYVTWTNRISEAENCAANGAMFRNVLSAVIPNAPNLRHICLLTGGKHYLAPFESIGKIQAHDPPFHEDIPRLDAPNFYYTLEDILFEESEKKEGGGLTWSVHRPNVIFGFSPLSLMNLIGSLCVYAAICKHLGLPLKFPGTKSAWDGFSMVSDADLIAEHQIWAAVDPYARNEAFNINNGDVFKWKHLWKELAEQFGIEDYGFDDDGDDGKRLKLVELMKDKGPVWEEIVKVNQLEPTKFEEVGVWWFADMMLSEAGALASMNKSKEHGFLGFRNSRNSFVYWIDKLKSYKIVP

SEQ ID NO: 480 - protein, 395 aa, Prunus persica
MSWWWAGAVGAAKKKLEGADTTAPEGYQSVALVIGLTGIVGNSLAEILPLHDTPGGPWKVYGVARRARPDWSVDHPVDYIQCDISDPEDTQAKLSELTDVTHIFYVTWTSRANEIENCEANGAMFRNLLRVVIPVAPNLRHVSLQTGTKHYLGPFECIGKIKAHDPPFTEDLPRLDVPNFYYTLEDILFEEVQKKEGLTWSVHRPYNIFGFSPHSLMNIIGTLCVYAAICKKEGKPLKFPGSKVAWECYAMASDADLIAEQHIWAAVDPNAANEAFNINNGDVFKWKQFWKGLAEQFGIEEHGFYEEEEGEGRLSLVEMMKGKEGVWEEIVKENELQPTKLEEVGVWWFADYVLGGEAVLDSMNKSKEHGFLGFRNSYKSFISWIEKMKSYKIVP

SEQ ID NO: 481 - protein, 391 aa, Sesamum indicum; identical to SEQ ID NO: 384

SEQ ID NO: 482 - protein, 395 aa, Panicum hallii
MSWWWAGAVGAAWKRRGDRAASSESFQFQSVALVVGSTGIVGTSLVDILPLPDTPGGPWKVYALSRRPPPPWFQPPSPSVTHIQVDLTDYSAAAEALAPLTDITHVFYVALSWRPTEAQSRETNSAMLRNVLSVVVSSCPRLAHVSLQTGTKHYFGRLGSKTRVHDPPYTEDMPRLDIPVFYYDQEDILFDTVARRAGWSVHRPNLIFGFSPRSEANVVCSLCVYAAICHKEGVKLRWPGSRAAWEGFNNGSDADLIAEQHIWAAVDPMAKNEAFNCSNGDVYRWKLLWPVLAGRFGLEWAGYEGEENRFQVAEAMAGKEAVWAAIVTENELVETEVNEVASWWVIDAVADQFGLDLEILDSMNKSKEHGFLDFRDTVKSFNTWIDRLKAQKIVP

SEQ ID NO: 483 - protein, 391 aa, Fragaria vesca
MSWWWAGAVGAHKKRLDGEDAGPRTPVSVGLVIGVTGIVGNSLAEILPLPDTPGGPWKVYGVARRPRPNWNADHPVDYVQCDVSKPNDVKAKLAPLTDVTHIFYVTWTSKATESENCEANAAMLRNVLNAMIPNAPNLKHICLQTGGNHYLGPFDTWGKIQPHDSPFKEDMPRLNVQNFYYTMEDLMFKEVEKKEGMSWSVHRPDTILWFSPHSMINILASLCVYAAICKHEGMPLRFPGTKGAWNCLSTASDADLIAEQQIWAAVDPYARNQAFNINNGDVFKWKHLWKVLAENFGIEECGFQEKGERVSLREMMKGKSGVWNEIVKKHQLVPTKLEQVGVWWFVDAIFSGECMFGCMNKSKEHGFVGFRNSRNSLVTWIDKMKAYKIVP

SEQ ID NO: 484 - protein, 365 aa, Setaria italica
MSWWWAGAVGTVRKRQDDLAAVSQSEQAFESVALVVGSTGIVGASLVDILLLPDTPGGPWKVLTPLIDITHVFYVAWTWRATEEENCEANSAMLRNVLSVVVPNCPALVHVSLQTGTRHYFGRLDSENCVHYPPYTEDMPRLDMPVFYYDQEDVLIDAVARRGGGAVSWSVHRPNIIFGFSPRCAINLVCSLCVYAAVCCKEGTPLRWPGSRGGWEGFITPSDADLVAEHHIWAGFDPMAKNEAFNCSNGDVCTWKKLWPILAGRFGLEWVGYEGEEKRLKLAEAMAGKEALWAEIVEENELVATHVSEVANWWVVDKSLDRYGLEWDILDSMNKSKEHGFLGFRNTFRSFNTCIDRLKAHKIVP

SEQ ID NO: 485 - protein, 388 aa, Populus trichocarpa
MSWWWAGDLSAAWKKPAVQGGQGSVALIVGVTGIVGNSLAEILPRSDTPGGPWKVYGVARRPRPNWHENCPVEYIQCDISDSALAKSKLSHLTDVTHIFYVTWASRSNEAENCKINGLMFRNLLQAVVPIATNLRHVSLQTGTKHYIGPFESFYNFESHDPPYSEDLPRLKVDNFYYTLEDVMFEEVAKKEGVTWSVHRPDIIFGFSPHSLMNIIVTLSVYAAICKHEGAPLMFPGTKEAWNCYAIASDADLVAEQEIWACVEPNAQNQAFNIHNADYFKWKHLWKVLAEQFGIEKYGFEEGGKRATLAERMKDKGPVWEEIVKKNQLFPTKLEEVGGWWYVDTMLSGDAFISCMNKSKEHGFLGFRNSTKSFVHWIGKMRSQKVIPN

SEQ ID NO: 486 - protein, 390 aa, Juglans regia
MSWWWARAIGAAKKKLEEDEQPRSFQSVGLVIGVTGIVGNSLAEILPLCDTPGGPWKVYGVARRPRPDWNADHPIEYIQCDVSDPEDTQAKLSPLTDVTHIFYVTWTTRPTEAENCEANKAMFRNVLLTVIPNAPSLRHVCLQTGTKQYLGPFESFRKFQTHDPPFTEDLPRLDAPNFYYTLEDVLFEEADKKEGLTWSVHRPNSIFGFSPYSLANIIGMFCVYAAICKHERVPLKFPGTKAAWDGYWVSSDADLIAEQQIWASVDPNARNEAFNCNNGDVFRWKHLWKVLAEQFGIDDYGLDEGEKVVSLVEMMKDKDAVWEEIIRENQLRPRKLEEVGMWVLVDLLFGGESPVDCMNKSKEHGFLGFRNSKNSFISWIDKLKSYKIVP

SEQ ID NO: 487 - protein, 390 aa, Jatropha curcas
MSWWWARAIGTASKKIEEDDRPPKFKSVALIIGVTGIVGNSLAEILPLADTPGGPWKVYGVARRPQPIWQAGHLTEHIQCDISNEEETFEKLSHLKDVTHIFYVTWASKPTEAENCKINGSMLQNVLKTVIPNAKNLQHICLQTGQKHYLGSFESIGKIVPHESPFHEDLPRLKAINFYYTLEDVLFDEVSKREGLTWSIHRPAAIFGVSPCSLMNVVGTFCVYATICKHKGLPLTFPGNQLAWDGYWYASDADLIAEHQIWAAVDPNAKNEAFNCSNGDVFKWKHLWKVLAEKFEIDNYGFEAGDKKLSLVERMKDMGPVWDEIVREKELVPTRLEEVGAWWLIDLFFQGAAYLDTMNKSKEHGFVGFRNSKTCFASWIDKMKSHRIVP

SEQ ID NO: 488 - protein, 392 aa, Hevea brasiliensis
MSWWWARAVEATKKTFEQDDVPPKYQSVALIIGVTGIVGSSLAEILPFADTPGGPWKVYGVARRPRPIWQANHLIEHIQCDISNEQETHEKLSILTDVTHIFYVTWARKSTEAENCLVNGSMLQNVLNAVILNARNLQHICLLTGRKHYMGSFESIGNIAPNEYPLHEDLPRLNVINFYYTLEDLLFDQVRKKEGLTWSIHRPGMIFGFSPFSLMNTLGTLCVYAAICKHQGLPLIFPGNHVAWDGYCDASDADLIAEHQIWAAVDPNAKNEAFNCSNGDVFKWKHLWNVLAEQFEIENYGIEEDGDKRLSLAEMMKDMGPIWDEIVKEKQLFPTRLEEVATWWLLDVVFQLEVSHLDTMNKSKEHGFVGFRNSKKSLVHWIDKIKAYKIVP

SEQ ID NO: 489 - protein, 389 aa, Camptotheca acuminata; identical to SEQ ID NO: 385

SEQ ID NO: 490 - protein, 392 aa, Malus domestica
MSWWWASAVEAAKKKHQEDRYEPPSIPKSVGLVIGITGIVGNSLAEILPLSDTPGGPWKVYGVARRPRPHWNADHAVDYIQCDISDPDDTQKKLSKLSDVTHIFYVTWTNRSTENENCEANAAMLRNVLRIVISNAPNLRHVCLQTGTKQYIGPFETFGKIDHHDPPCSEDLPRLNAPNFYYALEDVLLEEVGKKEDITWSVHRPGVIFGFSPYSLANMVAMLSVYAAICKHEGMPLKFPGSKEAWNCYSDASDADLIAEQQIWAAVDPYAKNKAFNVNNGDVFKWKQLWKVLAEQFEIEEYGFDEEGEKLSLAELMKVKEGVWEQIVKENQLEPMKLVEIGQWWLVDLVFGGEGLMTSMNKSKEHGFLGFRNSGNSFVSWIDKLKAFKIVP

SEQ ID NO: 491 - protein, 376 aa, Panicum hallii
MSWWWERAVGEVSKRRGDRAAASHRSFQVQSVALVVGSTGVVGASLVDILPQPDTPGGPWKVYALSPRPPPPWYPSRSPSSVTHVHVDLTDSPAVAEAHAPLTDITHVFYVAWSSRPTDAQNREANAAMLRNVLSAVVPTCPALAHVCLQTGTKHYVGSFEAIGRVPLPEPPYTEDMPRLDCPDFYYDQEDILVDAVSRRGGVSWSVHRPRLILGFAPRSAMNVVCSLCVYAAICRSEDVRAVVRWPGTRGAWEGFDNASDADLVSEQQIWAAVDPMAKNEAFNCSNGTAGMEDVRAVIAKENELVETQLNEVASWWLVEAQFCQFGANRAFLDSINKSKEHGFLGFRNTVKSFNTWIDEMKLHKIVPRCLFMMFI

SEQ ID NO: 492 - protein, 391 aa, Arachis duranensis
MSWWWERSTGAAAKNISNEIDESSQNLQNVALIIGVTGIVGNSLAEILSLQNTPGGPWKVYGVARRNRPAWNTNHPVHYVQCDISNPNDVALKLSPLTDVTHIFYVSWTSKSTEAQNIEVNGSMFRNVLNALISNAPNLRHVSLQTGVKHYVGPFELFGKIKANEPPFTEDLPRVNAPNFYYTQEDILFEMAQKKEGLTWFINRPQVIFGFSPYSLMNLIGTLCVYAAICKHEGVLLRFPGTKAAWECYSAASDANLIADQHVWGAVDARARNEAFNVSNGDVFRWKHLWKVLAEKFGIEEYGFVEGSSLRLSDLMKDKGGVWDEIVKKNNLQATKLEDVGDWWFADIILGMEAVLDNMNKAKEHGFLGFRDSKKSFINWIERTKAYKIVP

SEQ ID NO: 493 - protein, 388 aa, Catharanthus roseus; identical to SEQ ID NO: 373

SEQ ID NO: 494 - protein, 395 aa, Spinacia oleracea
MSWWWLGAIGSSLHKIESGDIPSKYHNVALVVGVTGISGNSLADILQLSTIPGGRWKVYGVGRRRQPEWQFHHNHVQYIQCNMVDPEDCQAKLSHLSDVTHIFYVGWVTKPTEQESSDENGKMLRNVLNAVIPNAPNLKHICLQTGQKYALPCLDSSAEIQHEPQFVEEFPREDITDSYYAMEDILDEEVQKKEKLTWSVHRPAVMFGFSPYSTRNIVGSLCVYATICKHEGQPLRFPGNQAAWDGYSEAGDADLVAEQQIWASLDNKGKKQAFNCSNGDLFKWKDLWKVLAEEFEVKFLEFEEESNSLEEMMREKGPVWDEIVQEKDLLPTKLEEVGTWWYVDSILRSSEAVLDSNNISRGMEKSRNYGFGGSRETAESFRFWIEHTRRYKIIP

SEQ ID NO: 495 - protein, 278 aa, Trifolium subterraneum
MSWWWSGAIGAAKKKFDEDEAPRSFQSVGLVIGVTGIVGNSLAEILPLPDTPGGRWKVYGVARRPRPSWNADHPIEYIQCDITDPNDTQTKLSVLTDVTHIFYVSWTNRPTEAENCEVNGAMLRNVLRAVIPNAPNLRHVSLQTGGKHYLGPFDLIGKIKSHEPPFTEDLPRLDAPNFYYTQEDILFEETKKKEGLSWSVHRPQVIFGFSPYSLMNIVGTLCVYATICKHEGVPLRFPGEGTVDIMNKAKEHGFVGFRNTKNSLIYWIDKTKGYKIVL

SEQ ID NO: 496 - protein, 390 aa, Ziziphus jujuba
MSWWWSGAIGAAKKKFDEIETPISYQSVGLVIGVTGIVGNSLAEILPLSDTPGGPWKVYGVARRPRPDWNADHPVEYIQCDIADADDINKKLSDLTDVTHLFYVTWANRSTEEENCEVNGTMFRNVLRAVIPNAPKLRHICLQTGTKHYTGPFESRGKQEHHDPPLTEDLPRLSGPNFYYTLEDVLYEETEDKPNLTWSVHRPNTIFGFSPFSLMNIIGTLCVYAAVCKHEGVPLKFPGKKAAWDSYSVASDADLVAEQQIWAAVDPYARNEAFNCNNGDVFKWKHLWKVLAEQFGIENYGIEEGDSLSLVDWAKGKENVWEEIVRENQLQPTKLEELGVWWFADLILGEEALLDSMNKSKEHGFMGFRNSRNSFISWVDKFKAYKIVPN

SEQ ID NO: 497 - protein, 389 aa, Medicago truncatula
MSWWWSGAIGAAKKKLDEDEAPQSFQNVALVVGVTGIVGNSLAEILPLADTPGGRWKVYGVARRPRPSWNADHPIEYIQRDITNSNDTQTKFSILTDVTHIFYVSWTSRPTEEDNCEVNGVMLLNVLRAVIPNAPNLCHVSLQTGGKHYLGPFALIDKINSHEPSFTEDLPRLDIPNFYYTQEDILFEETKKKEGLSWSVHRPLLIFGFSPYSLMNVVGTLCLYAAICKHEHISLKFPGTKRAWESYYMASDADLIAEQHIWAAVDTYAKNEAFNCSNGDVFRWKQLWKVLTEQFEIEEYGYEDGPRLRLAEMMKDKGPVWDEIVKENELQPTKLEEVAEWWVADATFGMEDIVDSMNKAKEHGFLGFRNSKNSLINWIDKTRAYKIVP

SEQ ID NO: 498 - protein, 390 aa, Medicago truncatula
MSWWWSGAIGAAKKKLDEDEAPRSFQNVALVVGVTGIVGNSLAEILPLADTPGGRWKVYGVARRPRPSWNADHPVEYIQCDITDPNDATTKLSVLTDVTHVFYVCWASRPTEAENCEINGTMLKNALTAVIPNAPNLRHVSIQTGGKHYVGPFESFGKIKYHEPPYTEDMPRLDYHNFYYTLEDVLFEETGKKEGVSWSVHRPLLIFGFSPYSMMNIIGTICVYAAICKHEGVPLRFPGTKLAWENYYMASDADLIAEQHIWAAVDPYAKNEAFNCSNGDVFRWKQLWKVIAEQFGIEEYGFDEEGPRLKLTELMKDKGPVWDEIVKENGLQVTKLEEVAEWWFADACFGGNGFTDSMNKSKEHGFLGFRNTKNSLINWIDRTRAYKIVP

SEQ ID NO: 499 - protein, 390 aa, Medicago truncatula
MSWWWSGAIGAAKKKLDEDEAPRSFQNVALVVGVTGIVGNSLAEILPLADTPGGRWKVYGVARRSRPSWNADHPVEYIQCDITDPNDATTKLSVLTDVTHVFYVCWASRPTEAENCEINGAMLKNVLTAVIPNAPNLRHVSIQTGGKHYVGPFESFGKIKYHEPPYTEDMPRLDYHNFYYTLEDVLFEETGKKEGVSWSVHRPLLIFGFSPYSMMNIIGTICVYAAICKHEGVPLRFPGTKLAWENYYMASDADLIAEQHIWAAVDPYAKNEAFNCSNGDVFRWKQLWKVIAEQFGIEEYGFDEEGPRLKLTELMKDKGPVWDEIVKENGLQVTKLEEVAEWWFADACFGGNGFTDSMNKSKEHGFLGFRNTKNSLINWIDRTRAYKIVP

SEQ ID NO: 500 - protein, 398 aa, Spinacia oleracea
MSWWWSGAIGAAKKKLEDSDEGSSSSSRNYQSVALIVGVTGIVGNSLAEILPLSDTPGGPWKIYGVARRPRPDWNSDHPIEYIQCDISDENDAVSKLSPLTDITNIFYVCWGNRDSEAENRELNSKMFRNVLNSTIPNSPNLKHICLQTGMKHYIGPFESWGKKIDHQHHDPPFNEDMPRLDIPNFYYDLEDILFAEIAKKESLTWSVHRPGSIFGFSPYSLMNVVGSLCVYAAICKHEGVPLQFPGTKASWESYSQASDADLIAEHQIWTSVDPYAKNEAFNCSNGDVFKWKQLWRVLGEQFEVEIADFDEDGERFSIEERMKGKEGVWEEIIRENGLVATKLEEVGSWWFLDKAFDGEWHLDTMNKSKEHGFLGFRNTKNSFVSWIDKMKAYKIVP

SEQ ID NO: 501 - protein, 389 aa, Juglans regia
MSWWWSGAIGAAKKKSDNRDSPPRYQSVALIIGVTGIIGNSLAEILPHSDTPGGPWKVYGVARRPRPAWSADYPIEYIQCDILDAQEAQTKLSKLTDVTHIFYVAWANMQDEADNCKVNADMLRNVLNTIIPKAPNLQHICLQTGRKHYVVAPELFEIVKPHEPPFHEDLPRLNVPHFYYSLEDVLFEQVAKEELLTWSVHRPGVIFGFSPRSLTNIVGSLCVYAAICKHEGEQLRFPGSLAAWEGYWDASDADMVAEHQIWAAVDSNAKNESFNCSNGDLFKWKHFWKVLAERFGVECGKFDENSNLSLQEMMKNKGPVWEEIVREKGLMPTKLEQVGTWWFVDEVLGAESFLDSMNKSKEYGFVGFRNSKTSFNYWIDKMRAHRIVP

SEQ ID NO: 502 - protein, 391 aa, Populus tremuloides
MSWWWSGAIGAAKKKTEDDEASRGYPSVALILGVTGIVGNSLAEILPLSDTPGGPWKVYGVARRPRPNWNEDHPVEYIQCDISNTAETQSKLSKLTDVTHVFYVTWASKSTEEENCEINGLMFRNVLQAVIPNAANLRHVCLQTGGKQYVGPFALLGKIEAHDPPFTEDLPRLNDFPNFYYTLEDVMYEEVAKKEGVTWSVHRPDIIFGFSPHSLMNLIVTISVYAAICKHEGAPLIFPGTKEAWNGYAIASDANLIAEHEIWACVEPKAKNEAFNINNGDLFKWKHMWTVLAQEFGIEKYGFVEGESSVTFAEKMKDKGPVWEEIVKKNQLLSNKLEQVGGWWFGDLIFSGSGYVASMNKAKEHGFLGFRNSKKSFVSWIHKMRAYKVVP

SEQ ID NO: 503 - protein, 341 aa, Vitis vinifera
MSWWWSGAIGAAKRKLQEDEAHPTNYQGVGLIVGVTGIVGNSLAEILPLRDTPGGPWKVYGVARRPQPAWNADNCVEYIQCDVFDPEETSSKLSKLTDVTHIFYVTWANMGSEAENCRHICLQTGRKHYIGPFEALGKIEPHDPPYHEEMPRLDVENFYHVQEDILFEEVRKKEGLTWSVHRPGVIFGFSPYSMMNAIGTLCVYATICKHEGLPLRFPGTQDTWNGYWDVSDADLIAEHHIWAAVDPFAKNEAFNCSNGDVFKWKHLWKVLAEQFGLEEKGLVPTKLEEVGQWWFADVVLSAGSSLDSMNKSKEHGFLGFRNSKSSFLSWIDKMKAYKFVP

SEQ ID NO: 504 - protein, 389 aa, Vitis vinifera
MSWWWSGAIGAAKRKLQEDEAHPTNYQGVGLIVGVTGIVGNSLAEILPLRDTPGGPWKVYGVARRPQPAWNADNCVEYIQCDVFDPEETSSKLSKLTDVTHIFYVTWANMGSEAENCRVNGDMFRNVLSAVIPNAPNLQHICLQTGRKHYIGPFEALGKIEPHDPPYHEEMPRLDVENFYHVQEDILFEEVRKKEGLTWSVHRPGVIFGFSPYSMMNAIGTLCVYATICKHEGLPLRFPGTQDTWNGYWDVSDADLIAEHHIWAAVDPFAKNEAFNCSNGDVFKWKHLWKVLAEQFGLEFHEPEGQGLSLEKMMKDKGPVWDEIVREKGLVPTKLEEVGQWWFADVVLSAGSSLDSMNKSKEHGFLGFRNSKSSFLSWIDKMKAYKFVP

SEQ ID NO: 505 - protein, 387 aa, Daucus carota
MSWWWSGAIGAARKKLEETEAPPKYESVALVIGVTGIVGNSLAEILPLSDTPGGPWKVYGVARRPRPSWNADHPIEYIQCDISNTDEAQSKLSQLTDVTHIFYVTWSSKPSEAENCKSNGHMFRNVLNAVIPNAINLKHVCLQTGRKHYLGPFELYGKVAHDPPYSEDLPRLNVENFYYTLEDILFEEVEKKEGLTWSVHRPGNIFGFSPYSMMNLIGTLCVYATICKHEGVPMRFPGAKAAWEGYSDASDADLIAEHQIWASVDPYAKDEAFNCSNGDVFKWKHLWKVFEEQFEVKCADFEGEGLCLVDLMKDKGPVWDEIVKVNGLTPTKLEDVAIWWFVDMVLGIECPLDTMNKSKEHGFLGFRNSKSSLITWIDRMKGYKIVP

SEQ ID NO: 506 - protein, 399 aa, Dendrobium catenatum
MSWWWSGAIGAVKKKLDDDFNAAAGKYPSVGLVIGATGIVGMSLVEILPLPDTPGGPWKVYAVSRRPRSSLLPPPSDGFAVETVLCDISDPADARALTKLSPLTDVTHLFYVAWANRESETENIAANTAMLRNVLDVVVPSAPNLQHVCLQTGRKHYIGSFDSLGKVKPHDPPFHEDLPRLPAPNFYYTQEDILFDSLRSRDGAVTWSVHRPTAIFGFAPTSLMNIVGTLCVYATICKREGEPLRWPGSRIAWEGFSDASDADLIAEQHIWAAVDPYAKNEAFNCSNGDVFKWKHLWTTLAEQFELEAVGYIGEVERFKLEAAMKGKEELWEKIVQENHLVPTNLEEVGNWWFVDIMLNNEEHLDTMNKSKEHGFLGFRNTRNSLISWIDKMKGYKIVP

SEQ ID NO: 507 - protein, 389 aa, Passiflora incarnata
MSWWWSGAIGAVRNSEQNDGPRSFESVALVVGVTGIVGNSLAEILPLADTPGGPWKVYGVARRPQPDWNADHPVEYIQCDIADSNDVQTKLSKLVDVTHIFYVTWANRSSEAENCRVNSLMLRNLLEALIPNAPNLRHICLQTGTKHYVGPFELVLQLETHDPPFTEDTPRLNAPNFYYTLEDILLEESKKKEGLTWSIHRPDIIFGFSPYSLMNIIGSLCIYAAICKHEGQPLLFPGTKESWENYAVASDADLIAEQEIWACVDPNAHNEVFNCHNGDLFKWKHLWKVLAEQFEIEKYGFEEREKRVTLEERMKDKGPVWDGIVQKHQLSSTKLEEIGAFWFPDIILGGWSNISCMNKCKEHGFFGFRNSKNSFISWIDKMKAYKIVP

SEQ ID NO: 508 - protein, 394 aa, Prunus avium
MSWWWSGAVGAAKKKFDPNNAPTKYESVALVAGITGIVGNSLAEILPLPDTPGGPWKVYGVARRPRPDWNVDHPVEYIRCDLSDPHQTHSELSQLTDVTHIFYVTWASKPTEVESCEANGNMFRNLLDAVIPNAPNLQHICLQTGRKHYIGPFEKWGKVEPHEPPFDGDLPRLNVPCFYYTLEDILFEEVKKKEGLTWSVHRPSVIFGFSPYSLMNIVGTFCVYAAICKHEGKKKLKYPGSKGFWNGYWDASDADLIAEHEIWAAVDPYAKNEAFNCSNGDLYKWKHLWRVLAEQFDMEFEDFDDDDEGGSRPSMGEMMKDKGPVWDEIVRENGLVPTKLEEIGNWWFVDVMFGIESSVDSMNKSKEHGFVGFRNSKTSFVTWIDKMKSYKLVP

SEQ ID NO: 509 - protein, 388 aa, Daucus carota
MSWWWSGAVGAARKTLNQDKVPSSYESVALVVGITGIVGNSLAEILPLPDTPGGPWKVYGVARRPRPPWDANHPVEYIQCDISNPEETQSSLSRLNDVTHLFYVTWASRSTEAENCEINSKMFRNVLNCIIPNAPKLQHICLQTGKKHYFGSFEASGIAAHDPPYSEDLPRLESPNFYYNLEDILFEEVKKKDGLTWSVHRPGTIFGFSPHSMMNMICTLSVYAAICKHEGTVLRFPGTKEAWSLYSEASDADLIAEQEIWAAVDPYAKNEAFNCSNGDVFKWKHFWKVLAEQFEVECGEFEGDERLTLVELMKDKESVWDEIVKEYNLVPTKLEDIGVWWFVDYILGIEYPLDTMNKSKEHGFLGFRNSKSSFIHWIDKLKDSKIVP

SEQ ID NO: 510 - protein, 388 aa, Solanum tuberosum
MSWWWSRAIGATKEKVEEDDVPKKCQSVGLIIGVTGIVGNSLAEILPGTDTPGGPWKVYGVARRPRPSWNVNYPIEYIQCDISSPEETQSKLTLLTDVTHVFYVTWAIRPTELENCEINGKMFQNVLDAIIPNCPNLSHICLQTGLKHYHGSFELFEKIAHDTPYHEGLPRLPAPNFYYTLEDILFEEVKKKEGLTWSIHRPGLIFGFSPYSMMNIIGTLCVYATICKHEGLPLRFPGSKSAWDGYSYCSDADLIAEHQIWASMDPNAKNEAFNISNGDVFKWKHLWKVLAEEFQVEAEEFDESKRWTLVEMMKDKGQIWDEIVKENGLVESKLEEIGRWWFVDLVLKKECPLDTMNKSKEHGFLGFRNSKNAFISWIYKIKACKFVP

SEQ ID NO: 511 - protein, 396 aa, Setaria italica
MSWWWTGAIGAVKKRQDEQAAAAEPTYQSVALVVGSTGIVGTSLLDILPLADTPGGPWKVYALSRRPLPPWSPPPSPAVTHLHLDLADAAAVADALKPLTDITHVFYVAWTARPTEAENREANAAMLRNVLSVVVPNCPALVHVCLQTGRKHYVGPFEALGGVSFPDPPFTEDMPRLDCPNFYYDMEDILFDEVNRREGAVSWSVHRPTTVFGYSPRSAMNVVGSLCVYAAICRKEGATFRWPGSRIAWEGFSDASDADLIAEHEIWAAVDPFAKNEAFNCSNGDLYKWKYLWPILADHFGVEWAGYEGEENRFKLEEAMAGKEALWAEIVRENELISTELDEITNWWFVDAVFGVEFEHLDSMNKSKEHGFLGFRNTVNSFNTWIEKLKVFKIVP

SEQ ID NO: 512 - protein, 387 aa, Antirrhinum majus
MSWWYRRSIGETEQKRIEINGVSPTYQSVALIVGVTGIAGSGLAETLSFSDTPGGPWKVYGVARRPCPKWLAKLNVNYVQCDIANTDETYSKVAPLTDITHIFYVSWTGSEDVALNTLMFKNILDSVIPNAPNLKHVSLQTGIKYYWGNMAEMDSTNQPHECPFYENMPRLKQDNFYYNLEDLVYDSAVRKNGLSWSIHRPALIFGFSPCSMMNTVSTLCVYAAICKHENKPLVYTGTETSWTCLWDAVDSDLLAEHFLWAATVPNAKNQAFNINNGDVFKWKHMWKVLAKEFDIEAIGYEGKEPVLLEDLMKDKDSVWDEIVKKHDLVPTKLRDIAAFWLADVVFRNKETLCSMNKNKEFGFMGFRDTTKSFVSSINKMRDFKFIP

SEQ ID NO: 513 - protein, 386 aa, Coffea canephora
MTANWWWNRSISPRKCVENGGQKEHNSAALIIGITGIVGSSLAEMLLLHDTPGNPWKVYGVARRPRPTWLSDKRLNYIQCDISNSRETISKLSPLIDITHIFYVCWVGSEDCDLNGSMFRNVLRVVIPNAPNLQHVCLQTGIKYYLGVFDERYKQEPHESPFTEDLPRLPIPNFYYDLEDILEEETKAKLGLTWSAHRPALVFGFSPCSMMNMVSTISVYATICKHENKPLVYPGSDFSWDCYYDVVDADLLAEQQIWASMEPKAKNQAFNCSNGDVFKWKHIWKILAEQFGLEMVEYRKGQKETSMAELMKGKEPVWDEIVKKHKLVPTKLNDIAAFWLADVVFYSDNRVSCMNKSKELGFLRFKDSTKSFLDSIEKMRAYGFIP

SEQ ID NO: 514 - protein, 401 aa, Panicum hallii
MTSSMSWWWRGAPLKREDEQVAAAAEPSPFQSVALVVGSTGIVGTSLVDILPLPDTPGGPWKVYALSRRPLPPWSPPPPSSVTHLHLDLADPVAVAEALTPLNDVTHVFYAAWSPRATEAQNREVNSAMLRNVLSAVVPSCPAIVHISLQTGTKHYMGPPEAFGRTAALDPPYSEDMPRLDWPNFYYDQEDLLFDAVAQCGDGAAVSWSVHRPNLIFGFSPRSAMNIVCSICVYAAICRKEGVPLRWPGSLGTWEGFSSASDADLIAEQQIWAAVDPTAKNEAFNCSNGDIYKWRQLWPILAERFGLEWVGYEGEENRVKVSEAMAGKEPLWAEIVKENQLVPTQLHEVANWWFVDALFSVELEFLDSMNKSKEHGFLGFRNTIKSFKSWIDRMKAYNIVP

SEQ ID NO: 515 - protein, 321 aa, Oryza sativa
MVSSALPRGEPVTHICVDLADPAAVSAALAPLTDITHVFYVAWAPHFFEEDQNREANSRMLRNVLSAVVPNCPALVHVSLQTGSKHYIGPPESIGKFTIETPFSEDMPRLDNCPNLYYDQEDALFDAVSRSRRRGAAVISWSVHRPSLVFGFSPQSAMNVVCTLCVYAAICRKEGGRKLRWPGSLGAWEGFSNASDADLVAEQHIWAAVDPAARNEAYNCSNGDVRDGVVGVRGGGEQGEPDGGGIVREEGLVAAAELDQVANWWFVDALFMDKWEFLDTMNKSKEHGFLGFRNTVKSFGTWIDKLRLYKIVPSCRIVSSL

SEQ ID NO: 516 - protein, 397 aa, Setaria italica
MWAGAIGAAWKRQDDRAAVSSQSQQAFQSVALVVGSTGIVGASLVDILPLPDTPGGSWKVYALSRRSLPPWSPPSSSSVTHIKVDLTDSAAVAEALTPLTDVTHVHVFYVALSPRPTEAQSRETNSAMLRNVLSVVVPTARRSSTDQALLRPPRLQDPRPRAAVHRGGEDMPRLDIPVFYYDQEDVLLDAVARGAASAVSWSVHRPNLIFGFFPRSATNIICSLCVYAAICLKEDIKLRWPGTRSAWEGFNTCSDADLIAEQHIWAAVDPMARNEAFNCSNGDIYKWKKLWPVLAGRFGLEWAGYEGEENRFKVAEAMTGKEAVWAAIVAENDLAETKLDEVASWWLIDAVADQYGLDREILDSMNKSKEHGFLGFRNTVKSFNTWIDKLKAHKIVP

SEQ ID NO: 517 - protein, 367 aa, Sesamum indicum
MYLDTTSWWFKRSIGEVDKKKVEPNGVAPSYQSVALIVGVTGIAGSGSAGLANLHVEYVQCDIAKTEETYSKLSPLTDITHIFYVSWTGSEDCELNTLMFRNILDAVIPNAPNLKHLSLQTGIKYYWGNMAEMDSSNQPHDCPFYENMPRLKQENFYYNLEDLVYESALRKNSLTWSIHRPALIFGFSPCSMMNTVSTLSVYAAICKHENKPLVYTGTEVSWTCLWDAVDADLLAEHFLWTATDPKAKNQAFNINNGDVFKWKHMWDVLAQQFGLEAVGYEGKEPVLLEDLMKDKEGVWDEIVKKHDLVPTKLRDIAAFWLADVVFRNKETLCSMNKNREFGFMGFRDTTKSFVNTINKMRAYRFIP

SEQ ID NO: 518 - protein, 394 aa, Digitalis purpurea; identical to SEQ ID NO: 389

SEQ ID NO: 519 - protein, 396 aa, Digitalis lanata
MYTDTTTWWYKRSIGDIKQKNVETNGVALNYKSVALIVGVTGIAGSGLAETLSMSDTPGGPWKVYGVARRPCPEWLAKLHVSYIQCDIGSTDDTSAKLSPLSDITHIFYVSWTGSEDCDKNAIMFKNILDSVIPNAPNLKHISLQTGIKHYWGNMVDEMDITNVSHDCPFNEYMPRLRQPNFYSNLEDLLYEACRTQNGALTWTVHRPALIFGFSPCSLMNIVATLSVYAAICKYENKPLVYTGTQTSWNCLVDAVDSDLLSEHLVWGAISPNAKNQAFNINNGDVFKWKHIWKVLAEQLQLEIEFVGYEGKEPVSLEGLMKDKDSVWDEMVEKYDLVPTKLRDIAAFWFADVAFSIEGAVSSMNKNKEFGFMGFRDSTKSFISSVNKVRSYRFVP

SEQ ID NO: 520 - protein, 271 aa, Nepeta mussinii
MASTANPMQVMKKKLEGKVVIVTGGASGIGQTAARVFAQHGARAVVIADIQSEVGKSVAKSIGDPCCYVQCDVSDEEEVKSMIEWTASAYGGLDMMFSNVGIMSKSAQTVMDLDLLEFDKVMRVNARGMAACLKHAARKMVELGTRGTIICTTTPLSSRGGQSMTDYAMSKHAVMGLVRSASIQLGAHGIRVNCVTPSVVLTPLAQRMGLATPDDFHTHFGNFTSLKGVYLTPEQVAEAVVYLASDDAAFITGHDLVLDGGLLCLPFFAPS

SEQ ID NO: 521 - protein, 271 aa, Nepeta mussinii; identical to SEQ ID NO: 520

SEQ ID NO: 522 - protein, 321 aa, Nepeta cataria
MADKEGEVVCVTGGSGFIGSWLVSLLLRRGYSVRATVKNLGDERETKHLEAIEGADSRLSLFQIDLLDYDSVATAVGDAAGVFHLASPCTIDQVNDPQRELLDPAIKGTLNVLKAAKNLGVRRVVVTSSISAMIASSNSLAETGEDCWIDEDYCRQNGLWYPVSKALAEKAAWKLAEENGLDIVVVNPGMVVGPILPPALNSSMQLMLHVLQGKDFFEGFFMGLVHVKDVALAQILLYENTSASGRHLCVESLSRYDDFAKQMEKLYPEYKLPRFSNNAQHGSLKSDAALKKLRDLGIEFAPLEQIVKDSIESLRSKGYIS

SEQ ID NO: 523 - protein, 321 aa, Nepeta cataria; identical to SEQ ID NO: 522

SEQ ID NO: 524 - protein, 321 aa, Nepeta cataria
MADKEGEVVCVTGGSGFIGSWLVSLLLRRGYSVRATVKNLGDERETKHLEAIEGADSRLSLFQIDLLDYDSVATAVGDAAGVFHLASPCTIDQVNDPQRELLDPAIKGTLNVLKAAKNLGVRRVVVTSSIGAMIASSNSLAETGEDCWIDEDYCRQNGLWYPVSKALAEKAAWKLAEENGLDIVVVNPGMVVGPILPPALNSSMQLMLHVLQGKDFFEGFFMGLVHVKDVALAQILLYENTSASGRHLCVESLSRYDDFAKQMEKLYPEYKLPRFSNNAQHGSLKSDAALKKLRDLGIEFAPLEQIVKDSIESLRSKGYIS

SEQ ID NO: 525 - protein, 321 aa, Nepeta cataria; identical to SEQ ID NO: 524

SEQ ID NO: 526 - protein, 321 aa, Nepeta cataria
MADKEGEVVCVTGGSGFIGSWLVSLLLRRGYSVRATVKNLGDERETKHLEAIEGADSRLSLFQIDLLDYDSVATAVGDAAGVFHLASPCTIDQVNDPQRELLDPAIKGTLNVLKAAKNLGVRRVVVTSSISAMIASSNSLAETGEDCWIDEDYCRQNGLWYPVSKALAEKAAWKLAEENGLDIVVVNPGMVVGPILPPALNSSMQLMLHVLQGKDFFEGFFMGLVHVKDVALAQILLYENTSASGRHLCVESLSRYDDFAKQMEKLYPEYKLPRFSNNAQHGSLKSDAALKKLRDLGIEFAPLEQIVKDSIESLRSGGYIS

SEQ ID NO: 527 - protein, 321 aa, Nepeta cataria; identical to SEQ ID NO: 526

SEQ ID NO: 528 - protein, 321 aa, Nepeta cataria
MADKEGEVVCVTGGSGFIGSWLVSLLLRRGYSVRATVKNLGDERETKHLEAIEGADSRLSLFQIDLLDYDSVATAVGDAAGVFHLASPCTIDQVNDPQRELLDPAIKGTLNVLKAAKNLGVRRVVVTSSIGAMIASSNSLAETGEDCWIDEDYCRQNGLWYPVSKALAEKAAWKLAEENGLDIVVVNPGMVVGPILPPALNSSMQLMLHVLQGKDFFEGFFMGLVHVKDVALAQILLYENTSASGRHLCVESLSRYDDFAKQMEKLYPEYKLPRFSNNAQHGSLKSDAALKKLRDLGIEFAPLEQIVKDSIESLRSGGYIS

SEQ ID NO: 529 - protein, 321 aa, Nepeta cataria; identical to SEQ ID NO: 528

SEQ ID NO: 530 - protein, 321 aa, Nepeta cataria; identical to SEQ ID NO: 522

SEQ ID NO: 531 - protein, 321 aa, Nepeta cataria; identical to SEQ ID NO: 524

SEQ ID NO: 532 - protein, 321 aa, Nepeta cataria; identical to SEQ ID NO: 526

SEQ ID NO: 533 - protein, 321 aa, Nepeta cataria; identical to SEQ ID NO: 528

SEQ ID NO: 534 - protein, 490 aa, Nepeta cataria
MQYKLALNGKTLKGETTTEAVDAATAEKVFKQYANDNGVDGEWTYDDATKTFTVTEAFCRSSLLLRKALGGSRRAAAAATCSSAYACGWQSERGRWYSGGEGTTISAPGYHVNTAPSHMTGAVFWDKDKPITYEEFEMPRPKANEVLIKTKACGACHSDLHVIKGDLKFPCPCILGHEITGEVVEHGPLTETKYIERYPVGSKVIGAFIMPCGSCFYCSRGEDDLCEPYFAYNRAKGTLYDGQTRLFLRGSGKPVHMWSMSGLAEYCVTPVNGLGALPDTLPYAESSVLGCAVFTAYGAIAHAAEVKPGNSVAVIGIGGVGSSCLQIAKAFGASEIIAVDVEDGKLETAKTFGATHIINSRKEDAIAKIKELTDGRGVDIAVEAIGGPKTFAQCVGSVRAGGKAVMIGLSPTGGKGEVEITQLVRRKVKVIGSYGGRAMTDLPKLVELAEQGTFNLEAAVTRRYKFEEVAQAYQDLQNKTIVGRGVIEIM

SEQ ID NO: 535 - protein, 319 aa, Unknown
  Nepeta cataria or Nepeta mussinii
MSREGEGKVVCVTGASGYVASWLVKLLLQRGYTVRATVRNLSDPLKTEHLKALDGAAERLELFEADLVKEGSFDSVFHGCDGVFHTASPVIFRTTNPQADLIEPAVKGTVNVLRSCTKASSVRRVVLTSSTAAVVVNGRPFGPDVVVDETWFSDPHFCEKNKDWYCLSKTLAEEAAWKFAKENGIDLVVMNPGLVLGPLLQPTLNITSQVFLDIIKGKPIAPYYQCVDVRDLGDAHILGFEKSSASGRYILVGKTITHLQFMQLLHNLYPSIVDAPTSVADNPIGEVSKKKAESLGMSFMPLEVTVKDSVESLKEKNFL

SEQ ID NO: 536 - protein, 324 aa, Unknown
  Nepeta cataria or Nepeta mussinii
MKRVCVTGGTGFIASWLIKRLLHTGYSVNTTVRKNADGKRDLRYLTNLPGASENLNIFDADLDQPDSFTPAIEGCVGVFHIVHPMEWDETESEETKTKRVIGGLLAILKACLDSPTVRRFMHTSSSSAVVFDGKDLDTRDETSWSHLDLMRNMGLQGNSYTITKTLAERTALEFGKQHGLDVISLVPSWVHGPFFTPRCPNSVLVFLALILGDENYYKFLMKASVVHVDDVARAFVHLFECPEAEGRYICSALEVTIEELSEFLSQRYPQFHIPTADSFKGIEPVKLCGLSSKKLLETGFKYEYGLEEMFDGAIHSCKEKGILY

SEQ ID NO: 537 - protein, 333 aa, Unknown
  Nepeta cataria or Nepeta mussinii
MGEETNMKGKVCVTGGTGFLGSWMVKRLLQHGYSVNTTTRIQAGEKKRNIDYLRNLAGASERLHIFDADLDRPESFSAAIEGCVGVFHVAHPLDFEERETEEVKIKRVVNGTVGILQACVDAKTVKRVVYCSSVATAVFNDKAATLDKIDESSWTDVEFLRSLGVFGGAYSVTKTLVEQTVLEFGERNGLDVVAILPSWIHGPFISPYCPDSVSICMALIQGDKKSYQRLVRTSLVHVDDVVRAHIHLFEYPQAKGRYICSNVDITIDKLHEFLKANYPEYKLPSTEEFEDLIPVAFPELSSKKLLETGFKFENGLQEMFDGAIKSCKKMGLL

SEQ ID NO: 538 - protein, 319 aa, Unknown
  Nepeta cataria or Nepeta mussinii
MAEKGKCVCVTGAGGYVASWLINLLLSQGYTVHATLRNPGDEKNGHLHKLENAPQNLKLFKADLLDFDSILAAVKGCDGLFHVASPAPPASVPNPQVEIVEPAVKGTLNVLKACFEASVCRVVIVSSGVAVFMNPNWPKDKVLDESCWSDAEFCARTNNWYCYSKTAAEAEAWSYAETNGLVLVSVCPTLVLGPMLQQTPNSSSLILLKLLKEGYEVTEDHDRVIVDVRDVAEAMKLVYENREAKGRYICTSHTIKTRDLVQMLKQIYPNYHYPKSFKEGKELPQLSSGKLEGLGWKYKPLDETLVDSVENYKQIGLLM

SEQ ID NO: 539 - protein, 329 aa, Unknown
  Nepeta cataria or Nepeta mussinii
MEKSVKVCVTGGAGYIASFLIKHLLLRGYTVHATLRDLGDDSKVGLLKRLDHAETRLKLFAGDMYNPTEFADAIYGCEFVFHIATPMQHTEGSQYKNTCEAAVAGAKMIAESCIKSRTVKKLIYTASVTAASPLKGDASGYEDVMDETCWTPLNHSFQLHYDYVNSKTLAEKEVLSYNGAGMGVVSLACGLVGGETIQSFASGSMAVLISQATNDGTLYKALRELEDLDSKVPIVHLQDVMEAHMFAMENSDMNGRFLVASDFLKSAQIASLIQKHYPHINISSQLIEDTKRETKWGSRKLQDLGFEYKCDADKIIYGSIVCAKKFGLI

SEQ ID NO: 540 - protein, 320 aa, Unknown
  Nepeta cataria or Nepeta mussinii
MAEKDKTVCVTGAGGFVASWLVKLLLSQGYTVHGTVRNPGDEKNAHLKRLDNAAENLKLFKADLLDFGSIIEAVKGCVGVFHVACPVPGSSVPNPEVELVQPALNGTLNVLKACSEVKVGRVVVVSSVAAVSMIRDWPKDQVMDENCWSDKEYCKETNNWYCYSKTVAEAEAWEYSKKNGLNIVTVCPTLVLGPMLQHMANASSTSLITMLKESISDIENNLRKIVDVRDVAEALKLVYEKPEAEGRYICMAHMIKNADLMDMLKIFYPNYDYPNDVKEGKDEKKVSSEKLQKLGWKFRPLKETVVDSVESYKQLGFLWS

SEQ ID NO: 541 - protein, 329 aa, Unknown
  Nepeta cataria or Nepeta mussinii
MSIAAAKTVCVTGASGYIASWIVKFLLQKGYTVKASVRDPNDQKKTQHLLALDGAKERLHLMKANLLEEGSFDSVVDGCDGVFHTASPFYHAVTDPQVELIEPAVKGTLNVLGSCAKVPSVKRIVLTSSIAAVAYNGKPRTPEVVVDETWWSAPDVCEQMQMWYVLSKTLAEDAAWKFVKEKGIEMVTINPAMVIGPLLQPTLNTSSAAILNLINGAETYPNSTFGWINVKDVARAHILAFENTSASGRYCLVESVVHTSEVVKILHELYPTYKLPDKCADDKPFVPTYQVSKEKAKSLGIEFTPLKEGIKETVESLKEKDMFKPSAAV

SEQ ID NO: 542 - protein, 310 aa, Unknown
  Nepeta cataria or Nepeta mussinii
MAEKSKILIIGGTGYIGKFIVEASAKSGHPTFALVRESAVSDPAKSPLIQGFKDSGVTILIGDLKDHESLLKAIKQVDVVISTVGQMQLDDQVNIIAAIKEAGNIKRFFPSEFGNDVDRTRAVEPAKSAFAAKAKIRRAIEAQGIPYTYVSSNYFAGYSLPTLAQPGAFAPPPPRDKVVIYGDGNAKAVFNGEHDIGTYTIKAVDDPRTLNKIVYIKPPKNTYSFNELVALWEKKINKTLEKEFIPEEQLLKQIQESPIPVNIILSINHSIFVKGDQTYFTIEPSFGVEASELYPDVKYTTVEEFLDQFV

SEQ ID NO: 543 - protein, 344 aa, Unknown
  Nepeta cataria or Nepeta mussinii
MAEEVSNKQIIFNDYITGFPKESDMMLKTSTIKLEVPEGCDDVVLVKNLYLSCDPYMRSRMSKLDDNYVPIFTPGSPIMGYGVAKVVDSCSPNFKKGDLIWGMIGWEEYSLIKSTDGLFKIEHEDVPLSYYTGILGMPGISAYVGFYEICCPREGENVFVSAASGAVGQLVGQFAKLLGCYVVGSAGTQDKVDLLKNKFGFDEAFNYKEEVDLNAALKRHFPEGIDVYFENVGGKMLEAVLLNMNMKGRIAACGMISDYNLKEAQGVKNLFSIVAKQIRMQGFLVFHYYSLYPKFLDFILPLIKQGKITYVEDVAEGLESAPPALVGLFSGHNVGKQLVRVVSQ

SEQ ID NO: 544 - protein, 316 aa, Unknown
  Nepeta cataria or Nepeta mussinii
MEKNERKSKILIFGGSGYIGSCMVKGSLKLGHSTYVFSRPNSSKKHLLNEFQSLGAIIVKGKLDEHNKLVSVMKEVDVVISALAYPQVLDQFKILEAIKEAGNIKRFLPSDFGVEEDKISVLPPFEEFLDKKRKIRRAIEESKIPYTFVSADVFGAYFINYLLHPYDPNNHEITVYGSGRAKFVMNYEEDIGIYTIKVATDPRACNRTVIYRPSTNTLTQLELISKWENKIGKKFKKIHFPEEEVVALSQKLPNPDNIPVAILHSIFVKGVTTCYEFAEDDVEASSLYPDMKFTTIDELLDIFLHNPPKPASAAFE

SEQ ID NO: 545 - protein, 342 aa, Unknown
  Nepeta cataria or Nepeta mussinii
MAKVVLVTGASGYLGGRLCHALLNQGYSVKAFVRETSALSYLPPPRDGGDGGGSLQLVYGDVTDYPSLLEAFTGCHLVFHTAALVEPWIPDPARFISVNVGGLRNVLKAYKETETIEKIIYTSSFFALGSTDGYIADETQVHPAKHFCTEYEKSKTISDKIALDAAAEGVPIVPVYPGVIYGPGKVTTGNSVAHLLVERFSGRMPGYVGKEQGFSFCHVDDVVQGHLAAMAKGKKGERYLLTGENASFKDVFDIAADITQTSKPQFQIPLFLVDVYGWVCILISRMTGKLPLISPPVVDVLRHQWAYSCEKAKKELDYNPRSLREGLLEMLPWLKSLGLIKY

SEQ ID NO: 546 - protein, 324 aa, Unknown
  Nepeta cataria or Nepeta mussinii
MGKIVCVTGASGYIASWLVKLLLHRGYTVKATVRNLSDRSKVAHLTSLEGANDRLHLYEANLLEEGSFDTAVDGCEGVFHTASPVSLSVSDPQAELIDPAVKGTMNVLKSCKKVSTIKRVVVTSSIASVLYNYDSLNLKHDTIVDETWFSDPIFCEENKEWYALSKTLAEKAAWKFAEENGLDLVTLHPGYTIGPSLQPTLNMTYVALLNLIKEGKQLLANGVYRYVDVRDVALAHIIALENPSARGRYCLVGRVAYSFEALDILRMMFPTLKLPPIETKDRPSKPPYHVSKERAESLGVSFRPLEESLKDSVESFRDRNLITL

SEQ ID NO: 547 - protein, 279 aa, Unknown
  Nepeta cataria or Nepeta mussinii
MSTKMAEALEPWSDLEGKTVMVTGASSGLGHEFCLDLARAGCRIVAAARRTDRLKSLCDEINRMRGGGSCRAMAVELDVTAGGPTIAASVDRAWAAFGSIDTLINNAGVRGEVRSSLELSEEEWNSVVKTNLNGSWLVSKYVGEKMRRGGGGGSIINISSISGLNRAQLRGGIAYSSSKAGLDSMTKIMALELGDHNIRVNSIAPGLFRSAITEDLVKKDWLKNVAERSVPLRTFGTSDPALTSLIRYLIHHSSSYVSGNIFIVDAGYTLPGYPIFSSL

SEQ ID NO: 548 - protein, 344 aa, Unknown
  Nepeta cataria or Nepeta mussinii
MEENLVGNKQIIFKGYIERVPKESDMELKLGNKIKLEAPEGSGAFLVKNLYLSCDPYMRGRMRDFHGSYIPPFLPGSVVEGFGVSKVIDSDNPNFKPGDIVSGFTGWEEYSLLHNTEQLRRVEPDNIPLSYHIGLLGMPGFTAYAGFYKVCDPKRNEHVFVSAASGAVGQLVGQLAKLHGCYVVGSAGSDQKVDLLKKKLGFDEAFNYKQEPDLDAALKKYFPEGIDIYFENVGGAMLEAVLLNMRVHGRIAVCGMVSQNGMDEQGIRNLFSLIPKRVRMQGFLQSDYLHLFPKFVEEVGNLYKEGKITYLEDMNQGLESGPCAFAGLFSGINIGKQVICVSPA

SEQ ID NO: 549 - protein, 321 aa, Unknown; identical to SEQ ID NO: 522
  Nepeta cataria or Nepeta mussinii

SEQ ID NO: 550 - protein, 315 aa, Unknown
  Nepeta cataria or Nepeta mussinii
MADAVVQPAAQRYALITGANKGIGFQICRQLESKGIVVILASRDEKRGIKARERLLKEFGVSSDNVVLHQLDVVDPASVAAVYEFIESRFGRLDILVNNAGIRGADVDGDVSLLEEYIKADGATISAGGKAEPFHPKANGRLVETFENAEECIETNYYGAKRVTEALLPLLHQSDSPRIVNVSSLLGSLVLQTNERAKGVFSNEEGLTQDKVDEVVQEFLKDFKEGKLEENNWPPHFPAYKVSKEALNAYTMLLAKRNPSFCTNAVCPGFSRTDMTFNSGLISESEAAEAPVKLALLPDGGPSGSFFYREEALSL

SEQ ID NO: 551 - protein, 310 aa, Unknown
  Nepeta cataria or Nepeta mussinii
MKAWTYKEYGGIEVLKLDSDVPIPEPKAEEVLIKVAAVGLNPIDFKRRLGFYEADRAPFPVVPGYDVAGVVVKVGNRVMNFEEGDEVYGDVVETALQDPRSLGTLAEYTIAEEKLLALKPRNLDFAEAASLPVAIQTAYQGLERARFSEGKSILVLGGAGGVGSLVIQVARYVFGASKIAATCSTANMDLVESLGADLVIDYSNHNFENYPDKFDVVFDTIGQSDRATKALKEGGCVVVIVGEHVDPPMFSFTLTASGEYLNMLNPYLETGMLKPVLDPNGTFPFDQVNEAFSYLESNRAIGKVVVYPIS

SEQ ID NO: 552 - protein, 183 aa, Nepeta cataria
MSKSLGFMKSVRPIALPLICLSELISTPIILDAPRALAPSTTANPTAPRPKTATVDPSSTSAVFHTAPRPVETPQLSRVIFSKEALRSILTTQAESSTVYSLNVEVLRKWKIGFPSFVENRHFPSPVMVLFIGFTLYFWHKLVFFDLQYTQFWHSPLKIGTMWSPISISLTPSPTLSTTPEAS

SEQ ID NO: 553 - protein, 188 aa, Nepeta cataria
MSSIPQRLAMDFPTSITKRYLTSDLASRSIAVFTSSMPISSMSAVMPCFPQKSNISCVSFTPPKSLPPMSFRPATRGKIGRSRGLLGNPTVISFPFIFNRLSNGVNWCTAAMVSMMKSIVPVAAFSCSASVLTTKASAPSLFMASIFFFGDVLITVTFIPKAFPNLTATWPSPPSPATPKCFPASVIP

SEQ ID NO: 554 - protein, 188 aa, Nepeta cataria
MSSSPQRLAMDFPTSITKRYLTSDLASRSIAVFTSSMPISSMSAVMPCFPQKSNISCVSFTPPKSLPPMSFRPATRGKIGRSRGLLGNPTVISFPFIFNRLSNGVNWCTAAMVSMMKSIVPVAAFSCSASVLTTKASAPSLFMASIFFFGDVLITVTFIPKAFPNLTATWPSPPSPATPKCFPASVIP

SEQ ID NO: 555 - protein, 382 aa, Nepeta cataria
MSSTKGQVIRCKAAVAWEAGKPLVIEEVEVAPPQKMEVRVKILFTSLCHTDVYFWEAKGQTPLFPRIFGHEAGGIVESVGEGVTELAPGDHVLPVFTGECKECRHCKSAESNMCDLLRINTDRGVMIEDGKSRFSKDGKEIYHFVGTSTFSEYTVVHVGCLAKINPAAPMDKVCILSCGISTGLGASLNVAKPTKGSTVAIFGLGAVGLAAAEGARIAGASRIIGVDLNANRFNEAKKFGVTEFVNPKDHEKPIQEVLVEMTDGGVDRSVECTGNVNAMISAFECVHDGWGVAVLVGVPNKDDTFKTHPVNLLNERTLKGTFFGNYKPRTDIPVVVEKYMNKEMDLQLEKFITHRISFSEINKAFDYMLRGESIRCIITMEN

SEQ ID NO: 556 - protein, 327 aa, Nepeta cataria
MEVRIRVLFTSICHTDLSAWKGETEAHRVYPRIFGHEASGVVESVGEGVSDIEIGDHIVPIFNGECQNCVYCKSKKTNLCQKYRVNPMKSTMTGDGKCRFSTKEGNPIFHFLNTSTFSEYTVLDSACVVKIDRKASLEKMTLLSCGVSTGLGAVWNTADVEEGSTVAVFGLGAVGLAVVEGARARGASRIIGVDINSDKQIKGRAIGLTDFINPKDLDIPVHQKIREMANGGVDYSFESAGNLDVLREAYLSTHDGWGFTVILGIHPTPRMLPLHPMELFDGRRIVASVFGDFKGKSQLPHFANQCIKGEVKLDEFITHEIDRKSVV

SEQ ID NO: 557 - protein, 240 aa, Nepeta cataria
MKSTMTGDGKCRFSTKEGNPIFHFLNTSTFSEYTVLDSACVVKIDRKASLEKMTLLSCGVSTGLGAVWNTADVEEGSTVAVFGLGAVGLAVVEGARARGASRIIGVDINSDKQIKGRAIGLTDFINPKDLDIPVHQKIREMANGGVDYSFESAGNLDVLREAYLSTHDGWGFTVILGIHPTPRMLPLHPMELFDGRRIVASVFGDFKGKSQLPHFANQCIKGEVKLDEFITHEIDRKSVV

SEQ ID NO: 558 - protein, 281 aa, Nepeta cataria
MPCGSCFFCSKGQDDLCESFFAYNRAKGTLYDGETRLFLRGSGKPVYMYSMGGLAEFCVVPAHGLTSLPNTLPYTESAVLGCAVFTAYGAMAHAAQVRPGDSVAVIGIGGVGSSCLQIAKAFGASEIIAVDVQDEKLEKAKILGATHAINSRKEDAVAKIKEITGGRGVDVAVEALGRPQTFSQCVQCVQDGGKAVMIGLTLSGAKGEVDINHLVRRQIKVIGSYGGRARQDLPKLVKLAEKGTFNLQAAVSRKYKFEEVEEAYKNLDQGSIVGRGVVEIM

SEQ ID NO: 559 - protein, 355 aa, Nepeta cataria
MGSHGEEENMAAWLLGINNLKILPFKLPLLGPHDARIRMKAVGICGSDVHYLKEMKLADFIVTEPMVIGHECAGIVEEVGAEVKHLVPGDRVAIEPGISCWRCNLCKEGRYNLCPEMKFFATPPVHGSLANQIVHPADLCFKLPNNVSLEEGAMCEPLSVGVHACRRANVGPETNVLVMGAGPIGLVTLLSARAFGSPRIVIVDVDDHRLSVAKSLGADETIKVSTNVNDVGAEVECIKAAMGGTIDIALDCAGFSKTMSTALAATSSGGKVCLVGMGHTEMTVPLAPAAVREVDLVGIFRYKNTWPLCIEFLQSGKIDVKPLITHRFGFSQKEVEDAFETSARGGTAIKVMFNL

SEQ ID NO: 560 - protein, 355 aa, Nepeta cataria
MAKSVNAVGWAARDTSGVLSPLKFARPAAGDRDVQFKVLYCGICHSDLHSIKNEWGHTQYPIIPGHEIVGVVTAVGPKATKFKAGDKVGVGCLVNSCRNCNQCAADLENYCPKIVQTYNSVLADGSVTYGGYSDVMTADEDFVIRWPENFPMDKGAPLLCAGVTTYSPLRYYGLDKPGLHIGVVGLGGLGHVAVKFAKAFGTKVTVISTSAGKKKEAIETLGADAFLISKDASEMQAAAGTLDGMIDTVSAQHPLPPLLSLLKPHGKLILVGAPEKPLELPAFPLLMGRKMVAGSIIGGIKETQEMIDFAAKHNILPDVEMIPMDYVNTAMERLAKADVKYRFVIDVGNTLTKAD

SEQ ID NO: 561 - protein, 359 aa, Nepeta cataria
MAKTPETEHPVKAFGYAATDNSGTFSPFKFSRRATGERDVQFKVLYCGVCHSDLHMVKNEWGVTHYPIVPGHEIVGVATEVGSKVEKVKVGDKVGVGVIVGSCRQCDQCSNDLENYCSKQILTYGAPYLDGTITRGGYSDIMVADEHFIIRWPENFPLDAGAPLLCAGITTYSPLRYFGLDKPGLRVGVNGLGGLGHVAVKFAKAFGTKVTVISSSLRKKKEAVEKLGVDEFLVSTDPEQMQAAIGTLDGIIDTVSAEHSVVSLLSLLKPHGRLIVVGAPEKPHQLPAFPLITGRKSISGSAIGGMKETQEMIDFAAKHNILPDVEVIPIDYINTAMERLLKSDVKYRFVIDVEKSLKA

SEQ ID NO: 562 - protein, 316 aa, Nepeta cataria
MYPVVPGHEITGIITKVGSNVTGFKVGDRAGVGCLAATCLKCECCQEGQENYCDDVQFVYNGIFWDGSITYGGYSDFLVADHRYVVRVPENLPMDAAAPLLCAGITVYAPMKDNNLLETKGKHVGVVGLGGLGHIAVKFAKAFGHHVTIISTSPSKEKEAREKLGADDFILSTDAKQMMTKKRSLDFILDTVSAKHSLGPLLELLKVKGTLVIVGAPEKPMDLPSFPLIFGKRVVKGSMIGSIKETQDMMDVCGKHNITCDIEVVNTDNINEALDRLAKNDVKYRFVIDITAKSTPKRSEERRVGKECRSRWSPYH

SEQ ID NO: 563 - protein, 208 aa, Nepeta cataria
MAEFQQKAFGLAAKDSSGVLSPFHFSRRDNGADDVTIKILYCGVCHSDLHTVKNEWGFTQYPVVPGHEISGLVTKIGNNVEKFKVGDRVGVGVIVGSCRTCDLCQQDLESYCPKMIFTYNATDKDGTRTYGGYSDIIVVDQHFVIRFPDNVPSDAGAPLLCAGITVYSPMKYYGMTEAGKHLGVAGLGGLGHVAVKFGKAFGDRKSVV

SEQ ID NO: 564 - protein, 355 aa, Nepeta cataria
MAKSVNAVGWAARDTSGLLSPLKFARPAAGDRDVQFKVLYCGICHSDLHSIKNEWGNTQYPIVPGHEIVGVVTAVGPKATKFKAGDKVGVGCLVNSCRHCDQCAADLENYCPQLVQTYNSVLADGSVTYGGYSDVMTADEDFVIRWPENFPMDKGAPLLCAGVTTYSPLRYYGLDKPGLHIGVVGLGGLGHVAVKFAKAFGTKVTVISTSAGKKKEAIETLGADAFLISKDASEMQAAAGTLDGMIDTVSAQHPLPPLLSLLKPHGKLILVGAPDKPLELPAFPLIMGRKMVAGSIIGGMKETQEMIDFAAKHNILPDVEMIPMDYVNTAMERLAKADVKYRFVIDVGNTLTKAD

SEQ ID NO: 565 - protein, 298 aa, Nepeta cataria
MYPVVPGHEITGIITKVGSNVTGFKVGDRAGVGCLAATCLKCECCQEGQENYCDDVQFVYNGIFWDGSITYGGYSDFLVADHRYVVRVPENLPMDAAAPLLCAGITVYAPMKDNNLLETKGKHVGVVGLGGLGHIAVKFAKAFGHHVTIISTSPSKEKEAREKLGADDFILSTDAKQMMTKKRSLDFILDTVSAKHSLGPLLELLKVKGTLVIVGAPEKPMDLPSFPLIFGKRVVKGSMIGSIKETQDMMDVCGKHNITCDIEVVNTDNINEALHRLAKNDVKYRFVIDIAAKSSPNI

SEQ ID NO: 566 - protein, 355 aa, Nepeta cataria
MAKSVNAVGWAARDTSGLLSPLKFARPAAGDRDVQFKVLYCGICHSDLHSIKNEWGNTQYPIVPGHEIVGVVTAVGPKATKFKAGDKVGVGCLVNSCRHCDQCAADLENYCPQLVQTYNSVLADGSVTYGGYSDVMTADEDFVIRWPENFPMDKGAPLLCAGVTTYSPLRYYGLDKPGLHIGVVGLGGLGHVAVKFAKAFGMKVTVISTSAGKKKEAIETLGADAFLISRDASEMQAAAGTLDGMIDTVSAQHPLPPLLSLLKPHGKLILVGAPEKPFELPAFPLLMGRKTVAGSVIGGLKETQEMIDFAAKHNLLPEVEMIPMDYVNTAMERLAKADVKYRFVIDVGNTLTKAD

SEQ ID NO: 567 - protein, 355 aa, Nepeta cataria
MAKSVNAVGWAARDTSGLLSPLKFARPAAGDRDVQFKVLYCGICHSDLHSIKNEWGNTQYPIVPGHEIVGVVTAVGPKATKFKAGDKVGVGCLVNSCRHCDQCAADLENYCPQLVQTYNSVLADGSVTYGGYSDVMTADEDFVIRWPENFPMDKGAPLLCAGVTTYSPLRYYGLDKPGLHIGVVGLGGLGHVAVKFAKAFGTKVTVISTSAGKKKEAIETLGADAFLISKDASEMQAAAGTLDGMIDTVSAQHPLPPLLSLLKPHGKLILVGAPEKPLELPAFPLLMGRKMVAGSIIGGIKETQEMIDFAAKHNILPDVEMIPMDYVNTAMERLAKADVKYRFVIDVGNTLTKAD

SEQ ID NO: 568 - protein, 355 aa, Nepeta cataria
MAEFQQKAFGLAAKDSSGVLSPFHFSRRDNGADDVTIKILYCGVCHSDLHTVKNEWGFTQYPVVPGHEISGLVTKIGNNVEKFKVGDRVGVGVIVGSCRTCDLCQQDLESYCPKMIFTYNATDKDGTRTYGGYSDIIVVDQHFVIRFPDNVPSDAGAPLLCAGITVYSPMKYYGMTEAGKHLGVAGLGGLGHVAVKFGKAFGMKVTVISTSPKKKIEAINKLGADAFVVSTDAEQLKAATGTMDFIIDTIAAVHQLTPLLSLLKMNGKLITVGLPNKPLDLPIFPLVAGRKLIGGSDFGGVKETQEMLDFCGKHGITADIELIGIEDVNTAMERLAKSDVRYRFVIDVGKSIANL

SEQ ID NO: 569 - protein, 171 aa, Nepeta cataria
MYPVVPGHEITGIITKVGSNVTGFKVGDRAGVGCLAATCLKCECCQEGQENYCDDVQFVYNGIFWDGSITYGGYSDFLVADHRYVVRVPENLPMDAAAPLLCAGITVYAPMKDNNLLETKGKHVGVVGLGGLGHIAVKFAKAFGHHVTIISTSPSKEKEAREKLGDRKSVV

SEQ ID NO: 570 - protein, 353 aa, Nepeta cataria
MTTANGECIGWAARDPCGTLSPYRFSRRSVGADDVYISIMYCGVCYADVIWTRNVMGHSNYPLVPGHEIVGIVKEVGSNVDRFKVGEHIGVGTYVNSCRECEYCDNQIEVHCSKGSILTFDGVDFDGTITKGGYSSYIVVHQRYCFVIPENYPPQLAAPLLCAGITVYTPMMRNNMNQPGKSLGVIGLGGLGHLAVKFGKAFGLKVTVFSTSISKKDEALNLLGADNFVLSSDEKEMKALKGSIDFIINTASGDISFDLYLSLLKTMGVFVLVGFPSEVKFLPGSLNLGAKTVTGSITGGTKQTQEMLAFCASHKIYPEIELIPIHYCNEALERLVKKDVKYRFVIDIANSLA

SEQ ID NO: 571 - protein, 314 aa, Nepeta cataria
MYCGVCYADVIWTRNVMGHSNYPLVPGHEIVGIVKEVGSNVDRFKVGEHIGVGTYVNSCRECEYCDNQIEVHCSKGSILTFDGVDFDGTITKGGYSSYIVVHQRYCFVIPENYPPQLAAPLLCAGITVYTPMMRNNMNQPGKSLGVIGLGGLGHLAVKFGKAFGLKVTVFSTSISKKDEALNLLGADNFVLSSDEKEMKALKGSIDFIINTASGDISFDLYLSLLKTMGVFVLVGFPSEVKFLPGSLNLGAKTVTGSITGGTKQTQEMLAFCASHKIYPEIELIPIHYCNEALERLVKKDVKYRFVIDIANSLA

SEQ ID NO: 572 - protein, 227 aa, Nepeta cataria
MYPVVPGHEITGIITKVGSNVTGFKVGDRAGVGCLAATCLKCECCQEGQENYCDDVQFVYNGIFWDGSITYGGYSDFLVADHRYVVRVPENLPMDAAAPLLCAGITVYAPMKDNNLLETKGKHVGIVGLGGLGHIAVKFAKAFGHHVTIISTSPSKENEAREKLGADDFILSTDAKQMMTKKRSLDFILDTVSAKHSLGPLLELLKVKRSEERRVGKECRSRWSPYH

SEQ ID NO: 573 - protein, 264 aa, Nepeta cataria
MYPVVPGHEITGIITKVGSNVTGFKVGDRAGVGCLAATCLKCECCQEGQENYCDDVQFVYNGIFWDGSITYGGYSDFLVADHRYVVRVPENLPMDAAAPLLCAGITVYAPMKDNNLLETKGKHVGVVGLGGLGHIAVKFAKAFGHHVTIISTSPSKEKEAREKLGADDFILSTDAKQMMTKKRSLDFILDTVSAKHSLGPLLELLKVKGTLVIVGAPEKPMDLPSFPLIFGKRVVKGSMIGSIKERSEERRVGKECRSRWSPYH

SEQ ID NO: 574 - protein, 374 aa, Nepeta cataria
MSAIRCKAAVAWAAGEPLVIEEVELSPPQPMEIRIKVVCTSLCRSDLTAWLSQAQPQLFPRIFGHEASGVVESVGEGVTEFEVGDHVLTLFTGECMKCKPCASGKSNTCHTLGLERQGVMHSDKKTRFSIKGKHVYHYCAVSSFSEYTVVHSGCAVKISPIAPLEKICLLSCGVAAGLGAAWKVANISEGSTVAIFGLGTVGLSVAQGAKRRGASRIIGIDTNPKKSETAKAFGVTDFVNPNDHDQPIQQVIIGITDGGADYAFECVGDTGMITAALQSCCAGWGLTVTLGVPKEEPGITAHYGLFLSGRTLTGSLFGGWKPKSDLPSLVDMYLKKEIEIDKYITHNLMFEDINEAFELMGKGKCLRCVIHMPK

SEQ ID NO: 575 - protein, 377 aa, Nepeta cataria
MGSLGSNNHSDHIFISNETIGKVITCKAAVAYAAGEPLVVEEIRVDPPQKMEVRIRVLFTSICHTDLSAWKGETEAHRVYPRIFGHEASGVVESVGEGVSDIEIGDHIVPIFNGECQNCVYCKSKKTNLCQKYRVNPMKSTMTGDGKCRFSTKEGNPIFHFLNTSTFSEYTVLDSACVVKIDRKASLEKMTLLSCGVSTGLGAVWNTADVEEGSTVAVFGLGAVGLAVVEGARARGASRIIGVDINSDKQIKGRAIGLTDFINPKDLDIPVHQKIREMANGGVDYSFESAGNLDVLREAYLSTHDGWGFTVILGIHPTPRMLPLHPMELFDGRRIVASVFGDFKGKSQLPHFANQCIKGEVKLDEFITHEIDRKSVV

SEQ ID NO: 576 - protein, 243 aa, Nepeta cataria
MSAIRCKAAVAWAAGEPLVIEEVELSPPQPMEIRIKVVCTSLCRSDLTAWLSQAQPQLFPRIFGHEASGVVESVGEGVTEFEVGDHVLTLFTGECMKCKPCASGKSNTCHTLGLERQGVMHSDKKTRFSIKGKHVYHYCAVSSFSEYTVVHSGCAVKISPIAPLEKICLLSCGVAAGLGAAWKVANISEGSTVAIFGLGTVGLSVAQGAKRRGASRIIGIDTNHRSEERRVGKECRSRWSPYH

SEQ ID NO: 577 - protein, 178 aa, Nepeta cataria
MSAIRCKAAVAWAAGEPLVIEEVELSPPQPMEIRIKVVCTSLCRSDLTAWLSQAQPQLFPRIFGHEASGVVESVGEGVTEFEVGDHVLTLFTGECMKCKPCASGKSNTCHTLGLERQGVMHSDKKTRFSIKGKHVYHYCAVSSFSEYTVVHSGCAVKISPIAPLEKICLLSCGVAAGT

SEQ ID NO: 578 - protein, 435 aa, Nepeta cataria
MAFCRSSLLLRKALGGSRRAAAAATCSSAYACGWQSERGRWYSGGEGTTISAPGYHVNTAPSHMTGAVFWDKDKPITYEEFEMPRPKANEVLIKTKACGACHSDLHVIKGDLKFPCPCILGHEITGEVVEHGPLTETKYIERYPVGSKVIGAFIMPCGSCFYCSRGEDDLCEPYFAYNRAKGTLYDGQTRLFLRGSGKPVHMWSMSGLAEYCVTPVNGLGALPDTLPYAESSVLGCAVFTAYGAIAHAAEVKPGNSVAVIGIGGVGSSCLQIAKAFGASEIIAVDVEDGKLETAKTFGATHIINSRKEDAIAKIKELTDGRGVDIAVEAIGGPKTFAQCVGSVRAGGKAVMIGLSPTGGKGEVEITQLVRRKVKVIGSYGGRAMTDLPKLVELAEQGTFNLEAAVTRRYKFEEVAQAYQDLQNKTIVGRGVIEIM

SEQ ID NO: 579 - protein, 222 aa, Nepeta cataria
MVVHHHFIVRIPDNMPLDAAAPLLCAGITTYSPLRYFGLDKPGLHIGVVGLGGLGHLAVKFAKAFGAKVTVISTSPNKKDQALSHLGADSFLISKNACEMKGAMGTMDGILDTVSAVHPVMELVGLLKAQGKLIMLGAPEKPLELTAFPLIAGRKMIAGSGIGGMKETQEMIDFAAKHNIKADIELIPMDYVNTAMDRLAKADVKYRFVIDVANTIKNSLLL

SEQ ID NO: 580 - protein, 379 aa, Nepeta cataria
MAQATPNHTQTVSGWAAHDTSGKITPYTFKRRENGEDDVTIKILYCGICHTDLHFAKNEWGITMYPVVPGHEITGIITKVGSNVTGFKVGDRAGVGCLAATCLKCECCQEGQENYCDDVQFVYNGIFWDGSITYGGYSDFLVADHRYVVRVPENLPMDAAAPLLCAGITVYAPMKDNNLLETKGKHVGVVGLGGLGHIAVKFAKAFGHHVTIISTSPSKEKEAREKLGADDFILSTDAKQMMTKKRSLDFILDTVSAKHSLGPLLELLKVKGTLVIVGAPEKPMDLPSFPLIFGKRVVKGSMIGSIKETQDMMDVCGKHNITCDIEVVNTDNINEALDRLAKNDVKYRFVIDITAKSTPKRSEERRVGKECRSRWSPYH

SEQ ID NO: 581 - protein, 361 aa, Nepeta cataria
MAQATPNHTQTVSGWAAHDTSGKITPYTFKRRENGEDDVTIKILYCGICHTDLHFAKNEWGITMYPVVPGHEITGIITKVGSNVTGFKVGDRAGVGCLAATCLKCECCQEGQENYCDDVQFVYNGIFWDGSITYGGYSDFLVADHRYVVRVPENLPMDAAAPLLCAGITVYAPMKDNNLLETKGKHVGVVGLGGLGHIAVKFAKAFGHHVTIISTSPSKEKEAREKLGADDFILSTDAKQMMTKKRSLDFILDTVSAKHSLGPLLELLKVKGTLVIVGAPEKPMDLPSFPLIFGKRVVKGSMIGSIKETQDMMDVCGKHNITCDIEVVNTDNINEALHRLAKNDVKYRFVIDIAAKSSPNI

SEQ ID NO: 582 - protein, 298 aa, Nepeta cataria
MYPVVPGHEITGIITKVGSNVTGFKVGDRAGVGCLAATCLKCECCQEGQENYCDDVQFVYNGIFWDGSITYGGYSDFLVADHRYVVRVPENLPMDAAAPLLCAGITVYAPMKDNNLLETKGKHVGVVGLGGLGHIAVKFAKAFGHHVTIISTSPSKEKEAREKLGADDFILSTDAKQMMTKKRSLDFILDTVSAKHSLGPLLELLKVKGTLVIVGAPEKPMDLPSFPLIFGKRVVKGSMIGSIKETQDMMDVCGKHNITCDIEVVNTDNINEALDRLAKNDVKYRFVIDITAKSTPKI

SEQ ID NO: 583 - protein, 234 aa, Nepeta cataria
MAQATPNHTQTVSGWAAHDTSGKITPYTFKRRENGEDDVTIKILYCGICHTDLHFAKNEWGITMYPVVPGHEITGIITKVGSNVTGFKVGDRAGVGCLAATCLKCECCQEGQENYCDDVQFVYNGIFWDGSITYGGYSDFLVADHRYVVRVPENLPMDAAAPLLCAGITVYAPMKDNNLLETKGKHVGVVGLGGLGHIAVKFAKAFGHHVTIISTSPSKEKEAREKLGDRKSVV

SEQ ID NO: 584 - protein, 314 aa, Nepeta cataria
MYCGVCYADVIWTRNVMGHSNYPLVPGHEIVGIVKEVGSNVDRFKVGEHIGVGTYVNSCRECEYCDNQIEVHCSKGSILTFDGVDFDGTITKGGYSSYIVVHQRYCFVIPENYPPQLAAPLLCAGITVYTPMMRNNMNQPGKSLGVIGLGGLGHLAVKFGKAFGLKVTVFSTSISKKHEALNLLGADNFVLSSDEKEMKALKGSIDFIINTASGDISFDLYLSLLKTMGVFVLVGFPSEVKFLPGSLNLGSKTVTGSITGGTKQTQEMLAFCASHKIYPEIELIPIHYCNEALERLVKKDVKYRFVIDIANSLA

SEQ ID NO: 585 - protein, 327 aa, Nepeta cataria
MAQATPNHTQTVSGWAAHDTSGKITPYTFKRRENGEDDVTIKILYCGICHTDLHFAKNEWGITMYPVVPGHEITGIITKVGSNVTGFKVGDRAGVGCLAATCLKCECCQEGQENYCDDVQFVYNGIFWDGSITYGGYSDFLVADHRYVVRVPENLPMDAAAPLLCAGITVYAPMKDNNLLETKGKHVGVVGLGGLGHIAVKFAKAFGHHVTIISTSPSKEKEAREKLGADDFILSTDAKQMMTKKRSLDFILDTVSAKHSLGPLLELLKVKGTLVIVGAPEKPMDLPSFPLIFGKRVVKGSMIGSIKERSEERRVGKECRSRWSPYH

SEQ ID NO: 586 - protein, 379 aa, Nepeta cataria
MATHGQVITCKAAVAWEPNKPLVIEEVQVAPPQAGEVRIQILFTALCHTDAYTWSGKDPEGLFPCILGHEAAGIVESVGEGVTEVQLGDHVIPCYQAECSECKFCKSGKTNLCGKVRVATGVGVMMTDRKSRFSVNGKPIYHFMGTSTFSQYTVVHDVSVAKIDPVAPLEKVCLLGCGVPTGLGAVWNTAKVEPGSIVAIFGLGTVGLAVAEGAKAAGASRVIGIDIDAKKFDRAKDFGVTECINPKDHEKPIQQVIVDLTDGGVDYSFECIGNVSVMRSALECCHKGWGTSVIVGVAASGQEISTRPFQLVTGRVWKGTAFGGFKSRSQVPWLVDKYLKKEIKVDEYITHNSTLAEINKAFDMMHEGMCLRVVLDMNM

SEQ ID NO: 587 - protein, 234 aa, Nepeta cataria
MYSMGGLAEFCVVPAHGLTSLPNTLPYTESAVLGCAVFTAYGAMAHAAQVRPGDSVAVIGIGGVGSSCLQIAKAFGASEIIAVDVQDEKLEKAKILGATHAINSRKEDAVAKIKEITGGRGVDVAVEALGRPQTFSQCVQCVQDGGKAVMIGLTLSGAKGEVDINHLVRRQIKVIGSYGGRARQDLPKLVKLAEKGTFNLQAAVSRKYKFEEVEEAYKNLDQGSIVGRGVVEIM

SEQ ID NO: 588 - protein, 171 aa, Nepeta cataria; identical to SEQ ID NO: 569

SEQ ID NO: 589 - protein, 208 aa, Nepeta cataria
MAKFQQKAFGLAAKDSSGVLSPFHFSRRDNGANDVTIKTLYCGICHSDLHTVKNEWGFTQYPVVPGHEISGLVTKVGNNVEKFKVGDRVGVGVIVGSCRTCDLCQQDLESYCPKMIFTYNATDKDGTRTYGGYSDIIVVDQHFVIRFPDNVPSDAGAPLLCAGITVYSPMKYYGMTEAGKHLGVAGLGGLGHVAVKFGKAFGDRKSVV

SEQ ID NO: 590 - protein, 355 aa, Nepeta cataria
MAKFQQKAFGLAAKDSSGVLSPFHFSRRDNGANDVTIKTLYCGICHSDLHTVKNEWGFTQYPVVPGHEISGLVTKVGNNVEKFKVGDRVGVGVIVGSCRTCDLCQQDLESYCPKMIFTYNATDKDGTRTYGGYSDIIVVDQHFVIRFPDNVPSDAGAPLLCAGITVYSPMKYYGMTEAGKHLGVAGLGGLGHVAVKFGKAFGMKVTVISTSPKKKIEAINKLGADAFVVSTDAEQLKAATGTMDFIIDTIAAVHQLTPLLSLLKMNGKLITVGLPNKPLDLPIFPLVAGRKLIGGSDFGGVKETQEMLDFCGKHGITADIELIGIEDVNTAMERLAKSDVRYRFVIDVGKSIANL

SEQ ID NO: 591 - protein, 319 aa, Unknown; identical to SEQ ID NO: 535
  Nepeta cataria or Nepeta mussinii

SEQ ID NO: 592 - protein, 324 aa, Unknown; identical to SEQ ID NO: 536
  Nepeta cataria or Nepeta mussinii

SEQ ID NO: 593 - protein, 333 aa, Unknown; identical to SEQ ID NO: 537
  Nepeta cataria or Nepeta mussinii

SEQ ID NO: 594 - protein, 319 aa, Unknown; identical to SEQ ID NO: 538
  Nepeta cataria or Nepeta mussinii

SEQ ID NO: 595 - protein, 329 aa, Unknown; identical to SEQ ID NO: 539
  Nepeta cataria or Nepeta mussinii

SEQ ID NO: 596 - protein, 320 aa, Unknown; identical to SEQ ID NO: 540
  Nepeta cataria or Nepeta mussinii

SEQ ID NO: 597 - protein, 329 aa, Unknown; identical to SEQ ID NO: 541
  Nepeta cataria or Nepeta mussinii

SEQ ID NO: 598 - protein, 310 aa, Unknown; identical to SEQ ID NO: 542
  Nepeta cataria or Nepeta mussinii

SEQ ID NO: 599 - protein, 344 aa, Unknown; identical to SEQ ID NO: 543
  Nepeta cataria or Nepeta mussinii

SEQ ID NO: 600 - protein, 316 aa, Unknown; identical to SEQ ID NO: 544
  Nepeta cataria or Nepeta mussinii

SEQ ID NO: 601 - protein, 342 aa, Unknown; identical to SEQ ID NO: 545
  Nepeta cataria or Nepeta mussinii

SEQ ID NO: 602 - protein, 324 aa, Unknown; identical to SEQ ID NO: 546
  Nepeta cataria or Nepeta mussinii

SEQ ID NO: 603 - protein, 279 aa, Unknown; identical to SEQ ID NO: 547
  Nepeta cataria or Nepeta mussinii

SEQ ID NO: 604 - protein, 344 aa, Unknown; identical to SEQ ID NO: 548
  Nepeta cataria or Nepeta mussinii

SEQ ID NO: 605 - protein, 321 aa, Unknown; identical to SEQ ID NO: 522
  Nepeta cataria or Nepeta mussinii

SEQ ID NO: 606 - protein, 315 aa, Unknown; identical to SEQ ID NO: 550
  Nepeta cataria or Nepeta mussinii

SEQ ID NO: 607 - protein, 310 aa, Unknown; identical to SEQ ID NO: 551
  Nepeta cataria or Nepeta mussinii

SEQ ID NO: 608 - protein, 863 aa, Unknown
  Valeriana officinalis or Saccharomyces cerevisiae
MIMELVEATRRTLRNESSDSTEKMRLIDSLQRLGLNHHFEQDIKEMLQDFANEHKNTNQDLFTTSLRFRLLRHNGFNVTPDVFNKFTEENGKFKESLGEDTIGILSLYEASYLGGKGEEILSEAMKFSESKLRESSGHVAPHIRRQIFQSLELPRHLRMARLESRRYIEEDYSNEIGADSSLLELAKLDFNSVQALHQMELTEISRWWKQLGLSDKLPFARDRPLECFLWTVGLLPEPKYSGCRIELAKTIAVLLVIDDIFDTYGSYDQLILFTNAIRRWDLDAMDELPEYMKICYMALYNTTNEICYKVLKENGWSVLPYLERTWIDMVEGFMLEAKWLNSGEQPNLEAYIENGVTTAGSYMALVHLFFLIGDGVNDENVKLLLDPYPKLFSSAGRILRLWDDLGTAKEEQERGDVSSSIQLYMKEKNVRSESEGREGIVEIIYNLWKDMNGELIGSNALPQAIIETSFNMARTSQVVYQHEDDTYFSSVDNYVQSLFFTPVSVSVGGGSMASEKEIRRERFLNVFPKLVEELNASLLAYGMPKEACDWYAHSLNYNTPGGKLNRGLSVVDTYAILSNKTVEQLGQEEYEKVAILGWCIELLQAYWLVADDMMDKSITRRGQPCWYKVPEVGEIAIWDAFMLEAAIYKLLKSHFRNEKYYIDITELFHEVTFQTELGQLMDLITAPEDKVDLSKFSLKKHSFIVTFETAYYSFYLPVALAMYVAGITDEKDLKQARDVLIPLGEYFQIQDDYLDCFGTPEQIGKIGTDIQDNKCSWVINKALELASAEQRKTLDENYGKKDSVAEAKCKKIFNDLKIEQLYHEYEESIAKDLKAKISQVDESRGFKADVLTAFLNKVYKRSK

SEQ ID NO: 609 - protein, 903 aa, Catharanthus roseus
MSSSSSSSSSMSLPLATPLIKDNESLIKFLRQPLVLPHEVDDSTKRRELLERTRKELELNAEKPLEALKMIDIIQRLGLSYHFEDDINSILTGFSNISSQTHEDLLTASLCFRLLRHNGHKINPDIFQKFMDNNGKFKDSLKDDTLGMLSLYEASYLGANGEEILMEAQEFTKTHLKNSLPAMAPSLSKKVSQALEQPRHRRMLRLEARRFIEEYGAENDHNPDLLELAKLDYNKVQSLHQMELSEITRWWKQLGLVDKLTFARDRPLECFLWTVGLLPEPKYSGCRIELAKTIAILLVIDDIFDTHGTLDELLLFTNAIKRWDLEAMEDLPEYMRICYMALYNTTNEICYKVLKENGWSVLPYLKATWIDMIEGFMVEAEWFNSDYVPNMEEYVENGVRTAGSYMALVHLFFLIGQGVTEDNVKLLIKPYPKLFSSSGRILRLWDDLGTAKEEQERGDLASSIQLFMREKEIKSEEEGRKGILEIIENLWKELNGELVYREEMPLAIIKTAFNMARASQVVYQHEEDTYFSSVDNYVKALFFTPCFGGGSMASEKEIRRERFLNVFPKLVEELNASLLAYGMPKEACDWYAHSLNYNTPGGKLNRGLSVVDTYAILSNKTVEQLGQEEYEKVAILGWCIELLQAYWLVADDMMDKSITRRGQPCWYKVPEVGEIAIWDAFMLEAAIYKLLKSHFRNEKYYIDITELFHEVTFQTELGQLMDLITAPEDKVDLSKFSLKKHSFIVTFETAYYSFYLPVALAMYVAGITDEKDLKQARDVLIPLGEYFQIQDDYLDCFGTPEQIGKIGTDIQDNKCSWVINKALELASAEQRKTLDENYGKKDSVAEAKCKKIFNDLKIEQLYHEYEESIAKDLKAKISQVDESRGFKADVLTAFLNKVYKRSK

SEQ ID NO: 610 - protein, 1161 aa, Artificial Sequence
  G8H-CPR engineered fusion
MTSALYASDLFKQLKSIMGTDSLSDDVVLVIATTSLALVAGFVVLLWKKTTADRSGELKPLMIPKSLMAKDEDDDLDLGSGKTRVSIFFGTQTGTAEGFAKALSEEIKARYEKAAVKDDYAADDDQYEEKLKKETLAFFCVATYGDGEPTDNAARFYKWFTEENERDIKLQQLAYGVFALGNRQYEHFNKIGIVLDEELCKKGAKRLIEVGLGDDDQSIEDDFNAWKESLWSELDKLLKDEDDKSVATPYTAVIPEYRVVTHDPRFTTQKSMESNVANGNTTIDIHHPCRVDVAVQKELHTHESDRSCIHLEFDISRTGITYETGDHVGVYAENHVEIVEEAGKLLGHSLDLVFSIHADKEDGSPLESAVPPPFPGPCTLGTGLARYADLLNPPRKSALVALAAYATEPSEAEKLKHLTSPDGKDEYSQWIVASQRSLLEVMAAFPSAKPPLGVFFAAIAPRLQPRYYSISSSPRLAPSRVHVTSALVYGPTPTGRIHKGVCSTWMKNAVPAEKSHECSGAPIFIRASNFKLPSNPSTPIVMVGPGTGLAPFRGFLQERMALKEDGEELGSSLLFFGCRNRQMDFIYEDELNNFVDQGVISELIMAFSREGAQKEYVQHKMMEKAAQVWDLIKEEGYLYVCGDAKGMARDVHRTLHTIVQEQEGVSSSEAEAIVKKLQTEGRYLRDVWGSTSSGTKNLPPGPSPLPFIGSLHLLGDQPHKSLAKLSKKHGPIMSLKLGQITTIVISSSTMAKEVLQKQDLAFSSRSVPNALHAHNQFKFSVVWLPVASRWRSLRKVLNSNIFSGNRLDANQHLRTRKVQELIAYCRKNSQSGEAVDVGRAAFRTSLNLLSNLIFSKDLTDPYSDSAKEFKDLVWNIMVEAGKPNLVDFFPLLEKVDPQGIRHRMTIHFGEVLKLFGGLVNERLEQRRSKGEKNDVLDVLLTTSQESPEEIDRTHIERMCLDLFVAGTDTTSSTLEWAMSEMLKNPDKMKKTQDELAQVIGRGKTIEESDINRLPYLRCVMKETLRIHPPVPFLIPRKVEQSVEVCGYNVPKGSQVLVNAWAIGRDETVWDDALAFKPERFMESELDIRGRDFELIPFGAGRRICPGLPLALRTVPLMLGSLLNSFNWKLEGGMAPKDLDMEEKFGITLQKAHPLRAVPSTL

SEQ ID NO: 611 - protein, 1159 aa, Artificial Sequence
  G8H-CPR engineered fusion
MTSALYASDLFKQLKSIMGTDSLSDDVVLVIATTSLALVAGFVVLLWKKTTADRSGELKPLMIPKSLMAKDEDDDLDLGSGKTRVSIFFGTQTGTAEGFAKALSEEIKARYEKAAVKDDYAADDDQYEEKLKKETLAFFCVATYGDGEPTDNAARFYKWFTEENERDIKLQQLAYGVFALGNRQYEHFNKIGIVLDEELCKKGAKRLIEVGLGDDDQSIEDDFNAWKESLWSELDKLLKDEDDKSVATPYTAVIPEYRVVTHDPRFTTQKSMESNVANGNTTIDIHHPCRVDVAVQKELHTHESDRSCIHLEFDISRTGITYETGDHVGVYAENHVEIVEEAGKLLGHSLDLVFSIHADKEDGSPLESAVPPPFPGPCTLGTGLARYADLLNPPRKSALVALAAYATEPSEAEKLKHLTSPDGKDEYSQWIVASQRSLLEVMAAFPSAKPPLGVFFAAIAPRLQPRYYSISSSPRLAPSRVHVTSALVYGPTPTGRIHKGVCSTWMKNAVPAEKSHECSGAPIFIRASNFKLPSNPSTPIVMVGPGTGLAPFRGFLQERMALKEDGEELGSSLLFFGCRNRQMDFIYEDELNNFVDQGVISELIMAFSREGAQKEYVQHKMMEKAAQVWDLIKEEGYLYVCGDAKGMARDVHRTLHTIVQEQEGVSSSEAEAIVKKLQTEGRYLRDVWGSTSSGGKNLPPGPTPLPFIGNLHLLGHHPHKSLARLAKTYGPLMLLRLGSENTVVVSSAAVAKEVLQKHDLAFSSRSIPDAVHAHDQFKYSVVWLPVASRWRSLRKTMNSNIFSGSCLDANQHLRSRKVEELIAYCKESCRRAEAVDVGRAAFRTALNSLSNTIFSRDLADPLSDSGKEFKDVVSSIMMEAGKPNSVDYYPFLSRFDPQGIRRRTAIYFDKLINIFKGLIDERLEKRRSQYEEATDVIDILLNTIEQNPEEIDRTHIERMFLDLFLAGTDTTSSTVEWAMAEAMKNPETMKKAKAELAQVIGKGKIVQETDIPHLPYLQCIVKETLRLHPPVPFLIPRRVHEDVDILGYVVPNNSQVFVNMWAIGRDPDMWKNPLQFDPDRFHDSEVGLRGKDFELIPFGAGRRICPGLPLAMRMVPVVLGSLLNSFDWKVEGGKELEMNEKFGITLEKAQPLMAVPIAL

SEQ ID NO: 612 - protein, 1165 aa, Artificial Sequence
  G8H-CPR engineered fusion
MTSALYASDLFKQLKSIMGTDSLSDDVVLVIATTSLALVAGFVVLLWKKTTADRSGELKPLMIPKSLMAKDEDDDLDLGSGKTRVSIFFGTQTGTAEGFAKALSEEIKARYEKAAVKDDYAADDDQYEEKLKKETLAFFCVATYGDGEPTDNAARFYKWFTEENERDIKLQQLAYGVFALGNRQYEHFNKIGIVLDEELCKKGAKRLIEVGLGDDDQSIEDDFNAWKESLWSELDKLLKDEDDKSVATPYTAVIPEYRVVTHDPRFTTQKSMESNVANGNTTIDIHHPCRVDVAVQKELHTHESDRSCIHLEFDISRTGITYETGDHVGVYAENHVEIVEEAGKLLGHSLDLVFSIHADKEDGSPLESAVPPPFPGPCTLGTGLARYADLLNPPRKSALVALAAYATEPSEAEKLKHLTSPDGKDEYSQWIVASQRSLLEVMAAFPSAKPPLGVFFAAIAPRLQPRYYSISSSPRLAPSRVHVTSALVYGPTPTGRIHKGVCSTWMKNAVPAEKSHECSGAPIFIRASNFKLPSNPSTPIVMVGPGTGLAPFRGFLQERMALKEDGEELGSSLLFFGCRNRQMDFIYEDELNNFVDQGVISELIMAFSREGAQKEYVQHKMMEKAAQVWDLIKEEGYLYVCGDAKGMARDVHRTLHTIVQEQEGVSSSEAEAIVKKLQTEGRYLRDVWGSTSSGSSGGTKNLPPGPSPLPFIGSLHLLGDQPHKSLAKLSKKHGPIMSLKLGQITTIVISSSTMAKEVLQKQDLAFSSRSVPNALHAHNQFKFSVVWLPVASRWRSLRKVLNSNIFSGNRLDANQHLRTRKVQELIAYCRKNSQSGEAVDVGRAAFRTSLNLLSNLIFSKDLTDPYSDSAKEFKDLVWNIMVEAGKPNLVDFFPLLEKVDPQGIRHRMTIHFGEVLKLFGGLVNERLEQRRSKGEKNDVLDVLLTTSQESPEEIDRTHIERMCLDLFVAGTDTTSSTLEWAMSEMLKNPDKMKKTQDELAQVIGRGKTIEESDINRLPYLRCVMKETLRIHPPVPFLIPRKVEQSVEVCGYNVPKGSQVLVNAWAIGRDETVWDDALAFKPERFMESELDIRGRDFELIPFGAGRRICPGLPLALRTVPLMLGSLLNSFNWKLEGGMAPKDLDMEEKFGITLQKAHPLRAVPSTL

SEQ ID NO: 613 - protein, 1163 aa, Artificial Sequence
  G8H-CPR engineered fusion
MTSALYASDLFKQLKSIMGTDSLSDDVVLVIATTSLALVAGFVVLLWKKTTADRSGELKPLMIPKSLMAKDEDDDLDLGSGKTRVSIFFGTQTGTAEGFAKALSEEIKARYEKAAVKDDYAADDDQYEEKLKKETLAFFCVATYGDGEPTDNAARFYKWFTEENERDIKLQQLAYGVFALGNRQYEHFNKIGIVLDEELCKKGAKRLIEVGLGDDDQSIEDDFNAWKESLWSELDKLLKDEDDKSVATPYTAVIPEYRVVTHDPRFTTQKSMESNVANGNTTIDIHHPCRVDVAVQKELHTHESDRSCIHLEFDISRTGITYETGDHVGVYAENHVEIVEEAGKLLGHSLDLVFSIHADKEDGSPLESAVPPPFPGPCTLGTGLARYADLLNPPRKSALVALAAYATEPSEAEKLKHLTSPDGKDEYSQWIVASQRSLLEVMAAFPSAKPPLGVFFAAIAPRLQPRYYSISSSPRLAPSRVHVTSALVYGPTPTGRIHKGVCSTWMKNAVPAEKSHECSGAPIFIRASNFKLPSNPSTPIVMVGPGTGLAPFRGFLQERMALKEDGEELGSSLLFFGCRNRQMDFIYEDELNNFVDQGVISELIMAFSREGAQKEYVQHKMMEKAAQVWDLIKEEGYLYVCGDAKGMARDVHRTLHTIVQEQEGVSSSEAEAIVKKLQTEGRYLRDVWGSTSSGSSGGGKNLPPGPTPLPFIGNLHLLGHHPHKSLARLAKTYGPLMLLRLGSENTVVVSSAAVAKEVLQKHDLAFSSRSIPDAVHAHDQFKYSVVWLPVASRWRSLRKTMNSNIFSGSCLDANQHLRSRKVEELIAYCKESCRRAEAVDVGRAAFRTALNSLSNTIFSRDLADPLSDSGKEFKDVVSSIMMEAGKPNSVDYYPFLSRFDPQGIRRRTAIYFDKLINIFKGLIDERLEKRRSQYEEATDVIDILLNTIEQNPEEIDRTHIERMFLDLFLAGTDTTSSTVEWAMAEAMKNPETMKKAKAELAQVIGKGKIVQETDIPHLPYLQCIVKETLRLHPPVPFLIPRRVHEDVDILGYVVPNNSQVFVNMWAIGRDPDMWKNPLQFDPDRFHDSEVGLRGKDFELIPFGAGRRICPGLPLAMRMVPVVLGSLLNSFDWKVEGGKELEMNEKFGITLEKAQPLMAVPIAL

SEQ ID NO: 614 - protein, 1170 aa, Artificial Sequence
  G8H-CPR engineered fusion
MTSALYASDLFKQLKSIMGTDSLSDDVVLVIATTSLALVAGFVVLLWKKTTADRSGELKPLMIPKSLMAKDEDDDLDLGSGKTRVSIFFGTQTGTAEGFAKALSEEIKARYEKAAVKDDYAADDDQYEEKLKKETLAFFCVATYGDGEPTDNAARFYKWFTEENERDIKLQQLAYGVFALGNRQYEHFNKIGIVLDEELCKKGAKRLIEVGLGDDDQSIEDDFNAWKESLWSELDKLLKDEDDKSVATPYTAVIPEYRVVTHDPRFTTQKSMESNVANGNTTIDIHHPCRVDVAVQKELHTHESDRSCIHLEFDISRTGITYETGDHVGVYAENHVEIVEEAGKLLGHSLDLVFSIHADKEDGSPLESAVPPPFPGPCTLGTGLARYADLLNPPRKSALVALAAYATEPSEAEKLKHLTSPDGKDEYSQWIVASQRSLLEVMAAFPSAKPPLGVFFAAIAPRLQPRYYSISSSPRLAPSRVHVTSALVYGPTPTGRIHKGVCSTWMKNAVPAEKSHECSGAPIFIRASNFKLPSNPSTPIVMVGPGTGLAPFRGFLQERMALKEDGEELGSSLLFFGCRNRQMDFIYEDELNNFVDQGVISELIMAFSREGAQKEYVQHKMMEKAAQVWDLIKEEGYLYVCGDAKGMARDVHRTLHTIVQEQEGVSSSEAEAIVKKLQTEGRYLRDVWGGGSGGSTSSGSSGGTKNLPPGPSPLPFIGSLHLLGDQPHKSLAKLSKKHGPIMSLKLGQITTIVISSSTMAKEVLQKQDLAFSSRSVPNALHAHNQFKFSVVWLPVASRWRSLRKVLNSNIFSGNRLDANQHLRTRKVQELIAYCRKNSQSGEAVDVGRAAFRTSLNLLSNLIFSKDLTDPYSDSAKEFKDLVWNIMVEAGKPNLVDFFPLLEKVDPQGIRHRMTIHFGEVLKLFGGLVNERLEQRRSKGEKNDVLDVLLTTSQESPEEIDRTHIERMCLDLFVAGTDTTSSTLEWAMSEMLKNPDKMKKTQDELAQVIGRGKTIEESDINRLPYLRCVMKETLRIHPPVPFLIPRKVEQSVEVCGYNVPKGSQVLVNAWAIGRDETVWDDALAFKPERFMESELDIRGRDFELIPFGAGRRICPGLPLALRTVPLMLGSLLNSFNWKLEGGMAPKDLDMEEKFGITLQKAHPLRAVPSTL

SEQ ID NO: 615 - protein, 1168 aa, Artificial Sequence
  G8H-CPR engineered fusion
MTSALYASDLFKQLKSIMGTDSLSDDVVLVIATTSLALVAGFVVLLWKKTTADRSGELKPLMIPKSLMAKDEDDDLDLGSGKTRVSIFFGTQTGTAEGFAKALSEEIKARYEKAAVKDDYAADDDQYEEKLKKETLAFFCVATYGDGEPTDNAARFYKWFTEENERDIKLQQLAYGVFALGNRQYEHFNKIGIVLDEELCKKGAKRLIEVGLGDDDQSIEDDFNAWKESLWSELDKLLKDEDDKSVATPYTAVIPEYRVVTHDPRFTTQKSMESNVANGNTTIDIHHPCRVDVAVQKELHTHESDRSCIHLEFDISRTGITYETGDHVGVYAENHVEIVEEAGKLLGHSLDLVFSIHADKEDGSPLESAVPPPFPGPCTLGTGLARYADLLNPPRKSALVALAAYATEPSEAEKLKHLTSPDGKDEYSQWIVASQRSLLEVMAAFPSAKPPLGVFFAAIAPRLQPRYYSISSSPRLAPSRVHVTSALVYGPTPTGRIHKGVCSTWMKNAVPAEKSHECSGAPIFIRASNFKLPSNPSTPIVMVGPGTGLAPFRGFLQERMALKEDGEELGSSLLFFGCRNRQMDFIYEDELNNFVDQGVISELIMAFSREGAQKEYVQHKMMEKAAQVWDLIKEEGYLYVCGDAKGMARDVHRTLHTIVQEQEGVSSSEAEAIVKKLQTEGRYLRDVWGGGSGGSTSSGSSGGGKNLPPGPTPLPFIGNLHLLGHHPHKSLARLAKTYGPLMLLRLGSENTVVVSSAAVAKEVLQKHDLAFSSRSIPDAVHAHDQFKYSVVWLPVASRWRSLRKTMNSNIFSGSCLDANQHLRSRKVEELIAYCKESCRRAEAVDVGRAAFRTALNSLSNTIFSRDLADPLSDSGKEFKDVVSSIMMEAGKPNSVDYYPFLSRFDPQGIRRRTAIYFDKLINIFKGLIDERLEKRRSQYEEATDVIDILLNTIEQNPEEIDRTHIERMFLDLFLAGTDTTSSTVEWAMAEAMKNPETMKKAKAELAQVIGKGKIVQETDIPHLPYLQCIVKETLRLHPPVPFLIPRRVHEDVDILGYVVPNNSQVFVNMWAIGRDPDMWKNPLQFDPDRFHDSEVGLRGKDFELIPFGAGRRICPGLPLAMRMVPVVLGSLLNSFDWKVEGGKELEMNEKFGITLEKAQPLMAVPIAL

SEQ ID NO: 616 - protein, 1187 aa, Artificial Sequence
  G8H-CPR engineered fusion
MDSSSEKLSPFELMSAILKGAKLDGSNSSDSGVAVSPAVMAMLLENKELVMILTTSVAVLIGCVVVLIWRRSSGSGKKVVEPPKLIVPKSVVEPEEIDEGKKKFTIFFGTQTGTAEGFAKALAEEAKARYEKAVIKVIDIDDYAADDEEYEEKFRKETLAFFILATYGDGEPTDNAARFYKWFVEGNDRGDWLKNLQYGVFGLGNRQYEHFNKIAKVVDEKVAEQGGKRIVPLVLGDDDQCIEDDFAAWRENVWPELDNLLRDEDDTTVSTTYTAAIPEYRVVFPDKSDSLISEANGHANGYANGNTVYDAQHPCRSNVAVRKELHTPASDRSCTHLDFDIAGTGLSYGTGDHVGVYCDNLSETVEEAERLLNLPPETYFSLHADKEDGTPLAGSSLPPPFPPCTLRTALTRYADLLNTPKKSALLALAAYASDPNEADRLKYLASPAGKDEYAQSLVANQRSLLEVMAEFPSAKPPLGVFFAAIAPRLQPRFYSISSSPRMAPSRIHVTCALVYEKTPGGRIHKGVCSTWMKNAIPLEESRDCSWAPIFVRQSNFKLPADPKVPVIMIGPGTGLAPFRGFLQERLALKEEGAELGTAVFFFGCRNRKMDYIYEDELNHFLEIGALSELLVAFSREGPTKQYVQHKMAEKASDIWRMISDGAYVYVCGDAKGMARDVHRTLHTIAQEQGSMDSTQAEGFVKNLQMTGRYLRDVWGSTSSGTKNLPPGPSPLPFIGSLHLLGDQPHKSLAKLSKKHGPIMSLKLGQITTIVISSSTMAKEVLQKQDLAFSSRSVPNALHAHNQFKFSVVWLPVASRWRSLRKVLNSNIFSGNRLDANQHLRTRKVQELIAYCRKNSQSGEAVDVGRAAFRTSLNLLSNLIFSKDLTDPYSDSAKEFKDLVWNIMVEAGKPNLVDFFPLLEKVDPQGIRHRMTIHFGEVLKLFGGLVNERLEQRRSKGEKNDVLDVLLTTSQESPEEIDRTHIERMCLDLFVAGTDTTSSTLEWAMSEMLKNPDKMKKTQDELAQVIGRGKTIEESDINRLPYLRCVMKETLRIHPPVPFLIPRKVEQSVEVCGYNVPKGSQVLVNAWAIGRDETVWDDALAFKPERFMESELDIRGRDFELIPFGAGRRICPGLPLALRTVPLMLGSLLNSFNWKLEGGMAPKDLDMEEKFGITLQKAHPLRAVPSTL

SEQ ID NO: 617 - protein, 1185 aa, Artificial Sequence
  G8H-CPR engineered fusion
MDSSSEKLSPFELMSAILKGAKLDGSNSSDSGVAVSPAVMAMLLENKELVMILTTSVAVLIGCVVVLIWRRSSGSGKKVVEPPKLIVPKSVVEPEEIDEGKKKFTIFFGTQTGTAEGFAKALAEEAKARYEKAVIKVIDIDDYAADDEEYEEKFRKETLAFFILATYGDGEPTDNAARFYKWFVEGNDRGDWLKNLQYGVFGLGNRQYEHFNKIAKVVDEKVAEQGGKRIVPLVLGDDDQCIEDDFAAWRENVWPELDNLLRDEDDTTVSTTYTAAIPEYRVVFPDKSDSLISEANGHANGYANGNTVYDAQHPCRSNVAVRKELHTPASDRSCTHLDFDIAGTGLSYGTGDHVGVYCDNLSETVEEAERLLNLPPETYFSLHADKEDGTPLAGSSLPPPFPPCTLRTALTRYADLLNTPKKSALLALAAYASDPNEADRLKYLASPAGKDEYAQSLVANQRSLLEVMAEFPSAKPPLGVFFAAIAPRLQPRFYSISSSPRMAPSRIHVTCALVYEKTPGGRIHKGVCSTWMKNAIPLEESRDCSWAPIFVRQSNFKLPADPKVPVIMIGPGTGLAPFRGFLQERLALKEEGAELGTAVFFFGCRNRKMDYIYEDELNHFLEIGALSELLVAFSREGPTKQYVQHKMAEKASDIWRMISDGAYVYVCGDAKGMARDVHRTLHTIAQEQGSMDSTQAEGFVKNLQMTGRYLRDVWGSTSSGGKNLPPGPTPLPFIGNLHLLGHHPHKSLARLAKTYGPLMLLRLGSENTVVVSSAAVAKEVLQKHDLAFSSRSIPDAVHAHDQFKYSVVWLPVASRWRSLRKTMNSNIFSGSCLDANQHLRSRKVEELIAYCKESCRRAEAVDVGRAAFRTALNSLSNTIFSRDLADPLSDSGKEFKDVVSSIMMEAGKPNSVDYYPFLSRFDPQGIRRRTAIYFDKLINIFKGLIDERLEKRRSQYEEATDVIDILLNTIEQNPEEIDRTHIERMFLDLFLAGTDTTSSTVEWAMAEAMKNPETMKKAKAELAQVIGKGKIVQETDIPHLPYLQCIVKETLRLHPPVPFLIPRRVHEDVDILGYVVPNNSQVFVNMWAIGRDPDMWKNPLQFDPDRFHDSEVGLRGKDFELIPFGAGRRICPGLPLAMRMVPVVLGSLLNSFDWKVEGGKELEMNEKFGITLEKAQPLMAVPIAL

SEQ ID NO: 618 - protein, 1191 aa, Artificial Sequence
  G8H-CPR engineered fusion
MDSSSEKLSPFELMSAILKGAKLDGSNSSDSGVAVSPAVMAMLLENKELVMILTTSVAVLIGCVVVLIWRRSSGSGKKVVEPPKLIVPKSVVEPEEIDEGKKKFTIFFGTQTGTAEGFAKALAEEAKARYEKAVIKVIDIDDYAADDEEYEEKFRKETLAFFILATYGDGEPTDNAARFYKWFVEGNDRGDWLKNLQYGVFGLGNRQYEHFNKIAKVVDEKVAEQGGKRIVPLVLGDDDQCIEDDFAAWRENVWPELDNLLRDEDDTTVSTTYTAAIPEYRVVFPDKSDSLISEANGHANGYANGNTVYDAQHPCRSNVAVRKELHTPASDRSCTHLDFDIAGTGLSYGTGDHVGVYCDNLSETVEEAERLLNLPPETYFSLHADKEDGTPLAGSSLPPPFPPCTLRTALTRYADLLNTPKKSALLALAAYASDPNEADRLKYLASPAGKDEYAQSLVANQRSLLEVMAEFPSAKPPLGVFFAAIAPRLQPRFYSISSSPRMAPSRIHVTCALVYEKTPGGRIHKGVCSTWMKNAIPLEESRDCSWAPIFVRQSNFKLPADPKVPVIMIGPGTGLAPFRGFLQERLALKEEGAELGTAVFFFGCRNRKMDYIYEDELNHFLEIGALSELLVAFSREGPTKQYVQHKMAEKASDIWRMISDGAYVYVCGDAKGMARDVHRTLHTIAQEQGSMDSTQAEGFVKNLQMTGRYLRDVWGSTSSGSSGGTKNLPPGPSPLPFIGSLHLLGDQPHKSLAKLSKKHGPIMSLKLGQITTIVISSSTMAKEVLQKQDLAFSSRSVPNALHAHNQFKFSVVWLPVASRWRSLRKVLNSNIFSGNRLDANQHLRTRKVQELIAYCRKNSQSGEAVDVGRAAFRTSLNLLSNLIFSKDLTDPYSDSAKEFKDLVWNIMVEAGKPNLVDFFPLLEKVDPQGIRHRMTIHFGEVLKLFGGLVNERLEQRRSKGEKNDVLDVLLTTSQESPEEIDRTHIERMCLDLFVAGTDTTSSTLEWAMSEMLKNPDKMKKTQDELAQVIGRGKTIEESDINRLPYLRCVMKETLRIHPPVPFLIPRKVEQSVEVCGYNVPKGSQVLVNAWAIGRDETVWDDALAFKPERFMESELDIRGRDFELIPFGAGRRICPGLPLALRTVPLMLGSLLNSFNWKLEGGMAPKDLDMEEKFGITLQKAHPLRAVPSTL

SEQ ID NO: 619 - protein, 1189 aa, Artificial Sequence
  G8H-CPR engineered fusion
MDSSSEKLSPFELMSAILKGAKLDGSNSSDSGVAVSPAVMAMLLENKELVMILTTSVAVLIGCVVVLIWRRSSGSGKKVVEPPKLIVPKSVVEPEEIDEGKKKFTIFFGTQTGTAEGFAKALAEEAKARYEKAVIKVIDIDDYAADDEEYEEKFRKETLAFFILATYGDGEPTDNAARFYKWFVEGNDRGDWLKNLQYGVFGLGNRQYEHFNKIAKVVDEKVAEQGGKRIVPLVLGDDDQCIEDDFAAWRENVWPELDNLLRDEDDTTVSTTYTAAIPEYRVVFPDKSDSLISEANGHANGYANGNTVYDAQHPCRSNVAVRKELHTPASDRSCTHLDFDIAGTGLSYGTGDHVGVYCDNLSETVEEAERLLNLPPETYFSLHADKEDGTPLAGSSLPPPFPPCTLRTALTRYADLLNTPKKSALLALAAYASDPNEADRLKYLASPAGKDEYAQSLVANQRSLLEVMAEFPSAKPPLGVFFAAIAPRLQPRFYSISSSPRMAPSRIHVTCALVYEKTPGGRIHKGVCSTWMKNAIPLEESRDCSWAPIFVRQSNFKLPADPKVPVIMIGPGTGLAPFRGFLQERLALKEEGAELGTAVFFFGCRNRKMDYIYEDELNHFLEIGALSELLVAFSREGPTKQYVQHKMAEKASDIWRMISDGAYVYVCGDAKGMARDVHRTLHTIAQEQGSMDSTQAEGFVKNLQMTGRYLRDVWGSTSSGSSGGGKNLPPGPTPLPFIGNLHLLGHHPHKSLARLAKTYGPLMLLRLGSENTVVVSSAAVAKEVLQKHDLAFSSRSIPDAVHAHDQFKYSVVWLPVASRWRSLRKTMNSNIFSGSCLDANQHLRSRKVEELIAYCKESCRRAEAVDVGRAAFRTALNSLSNTIFSRDLADPLSDSGKEFKDVVSSIMMEAGKPNSVDYYPFLSRFDPQGIRRRTAIYFDKLINIFKGLIDERLEKRRSQYEEATDVIDILLNTIEQNPEEIDRTHIERMFLDLFLAGTDTTSSTVEWAMAEAMKNPETMKKAKAELAQVIGKGKIVQETDIPHLPYLQCIVKETLRLHPPVPFLIPRRVHEDVDILGYVVPNNSQVFVNMWAIGRDPDMWKNPLQFDPDRFHDSEVGLRGKDFELIPFGAGRRICPGLPLAMRMVPVVLGSLLNSFDWKVEGGKELEMNEKFGITLEKAQPLMAVPIAL

SEQ ID NO: 620 - protein, 1196 aa, Artificial Sequence
  G8H-CPR engineered fusion
MDSSSEKLSPFELMSAILKGAKLDGSNSSDSGVAVSPAVMAMLLENKELVMILTTSVAVLIGCVVVLIWRRSSGSGKKVVEPPKLIVPKSVVEPEEIDEGKKKFTIFFGTQTGTAEGFAKALAEEAKARYEKAVIKVIDIDDYAADDEEYEEKFRKETLAFFILATYGDGEPTDNAARFYKWFVEGNDRGDWLKNLQYGVFGLGNRQYEHFNKIAKVVDEKVAEQGGKRIVPLVLGDDDQCIEDDFAAWRENVWPELDNLLRDEDDTTVSTTYTAAIPEYRVVFPDKSDSLISEANGHANGYANGNTVYDAQHPCRSNVAVRKELHTPASDRSCTHLDFDIAGTGLSYGTGDHVGVYCDNLSETVEEAERLLNLPPETYFSLHADKEDGTPLAGSSLPPPFPPCTLRTALTRYADLLNTPKKSALLALAAYASDPNEADRLKYLASPAGKDEYAQSLVANQRSLLEVMAEFPSAKPPLGVFFAAIAPRLQPRFYSISSSPRMAPSRIHVTCALVYEKTPGGRIHKGVCSTWMKNAIPLEESRDCSWAPIFVRQSNFKLPADPKVPVIMIGPGTGLAPFRGFLQERLALKEEGAELGTAVFFFGCRNRKMDYIYEDELNHFLEIGALSELLVAFSREGPTKQYVQHKMAEKASDIWRMISDGAYVYVCGDAKGMARDVHRTLHTIAQEQGSMDSTQAEGFVKNLQMTGRYLRDVWGGGSGGSTSSGSSGGTKNLPPGPSPLPFIGSLHLLGDQPHKSLAKLSKKHGPIMSLKLGQITTIVISSSTMAKEVLQKQDLAFSSRSVPNALHAHNQFKFSVVWLPVASRWRSLRKVLNSNIFSGNRLDANQHLRTRKVQELIAYCRKNSQSGEAVDVGRAAFRTSLNLLSNLIFSKDLTDPYSDSAKEFKDLVWNIMVEAGKPNLVDFFPLLEKVDPQGIRHRMTIHFGEVLKLFGGLVNERLEQRRSKGEKNDVLDVLLTTSQESPEEIDRTHIERMCLDLFVAGTDTTSSTLEWAMSEMLKNPDKMKKTQDELAQVIGRGKTIEESDINRLPYLRCVMKETLRIHPPVPFLIPRKVEQSVEVCGYNVPKGSQVLVNAWAIGRDETVWDDALAFKPERFMESELDIRGRDFELIPFGAGRRICPGLPLALRTVPLMLGSLLNSFNWKLEGGMAPKDLDMEEKFGITLQKAHPLRAVPSTL

SEQ ID NO: 621 - protein, 1194 aa, Artificial Sequence
  G8H-CPR engineered fusion
MDSSSEKLSPFELMSAILKGAKLDGSNSSDSGVAVSPAVMAMLLENKELVMILTTSVAVLIGCVVVLIWRRSSGSGKKVVEPPKLIVPKSVVEPEEIDEGKKKFTIFFGTQTGTAEGFAKALAEEAKARYEKAVIKVIDIDDYAADDEEYEEKFRKETLAFFILATYGDGEPTDNAARFYKWFVEGNDRGDWLKNLQYGVFGLGNRQYEHFNKIAKVVDEKVAEQGGKRIVPLVLGDDDQCIEDDFAAWRENVWPELDNLLRDEDDTTVSTTYTAAIPEYRVVFPDKSDSLISEANGHANGYANGNTVYDAQHPCRSNVAVRKELHTPASDRSCTHLDFDIAGTGLSYGTGDHVGVYCDNLSETVEEAERLLNLPPETYFSLHADKEDGTPLAGSSLPPPFPPCTLRTALTRYADLLNTPKKSALLALAAYASDPNEADRLKYLASPAGKDEYAQSLVANQRSLLEVMAEFPSAKPPLGVFFAAIAPRLQPRFYSISSSPRMAPSRIHVTCALVYEKTPGGRIHKGVCSTWMKNAIPLEESRDCSWAPIFVRQSNFKLPADPKVPVIMIGPGTGLAPFRGFLQERLALKEEGAELGTAVFFFGCRNRKMDYIYEDELNHFLEIGALSELLVAFSREGPTKQYVQHKMAEKASDIWRMISDGAYVYVCGDAKGMARDVHRTLHTIAQEQGSMDSTQAEGFVKNLQMTGRYLRDVWGGGSGGSTSSGSSGGGKNLPPGPTPLPFIGNLHLLGHHPHKSLARLAKTYGPLMLLRLGSENTVVVSSAAVAKEVLQKHDLAFSSRSIPDAVHAHDQFKYSVVWLPVASRWRSLRKTMNSNIFSGSCLDANQHLRSRKVEELIAYCKESCRRAEAVDVGRAAFRTALNSLSNTIFSRDLADPLSDSGKEFKDVVSSIMMEAGKPNSVDYYPFLSRFDPQGIRRRTAIYFDKLINIFKGLIDERLEKRRSQYEEATDVIDILLNTIEQNPEEIDRTHIERMFLDLFLAGTDTTSSTVEWAMAEAMKNPETMKKAKAELAQVIGKGKIVQETDIPHLPYLQCIVKETLRLHPPVPFLIPRRVHEDVDILGYVVPNNSQVFVNMWAIGRDPDMWKNPLQFDPDRFHDSEVGLRGKDFELIPFGAGRRICPGLPLAMRMVPVVLGSLLNSFDWKVEGGKELEMNEKFGITLEKAQPLMAVPIAL

SEQ ID NO: 622 - protein, 1141 aa, Artificial Sequence
  G8H-CPR engineered fusion
MDYLTIILTLLFALTLYEAFSYLSRRTKNLPPGPSPLPFIGSLHLLGDQPHKSLAKLSKKHGPIMSLKLGQITTIVISSSTMAKEVLQKQDLAFSSRSVPNALHAHNQFKFSVVWLPVASRWRSLRKVLNSNIFSGNRLDANQHLRTRKVQELIAYCRKNSQSGEAVDVGRAAFRTSLNLLSNLIFSKDLTDPYSDSAKEFKDLVWNIMVEAGKPNLVDFFPLLEKVDPQGIRHRMTIHFGEVLKLFGGLVNERLEQRRSKGEKNDVLDVLLTTSQESPEEIDRTHIERMCLDLFVAGTDTTSSTLEWAMSEMLKNPDKMKKTQDELAQVIGRGKTIEESDINRLPYLRCVMKETLRIHPPVPFLIPRKVEQSVEVCGYNVPKGSQVLVNAWAIGRDETVWDDALAFKPERFMESELDIRGRDFELIPFGAGRRICPGLPLALRTVPLMLGSLLNSFNWKLEGGMAPKDLDMEEKFGITLQKAHPLRAVPSTLGSTSSGWKKTTADRSGELKPLMIPKSLMAKDEDDDLDLGSGKTRVSIFFGTQTGTAEGFAKALSEEIKARYEKAAVKDDYAADDDQYEEKLKKETLAFFCVATYGDGEPTDNAARFYKWFTEENERDIKLQQLAYGVFALGNRQYEHFNKIGIVLDEELCKKGAKRLIEVGLGDDDQSIEDDFNAWKESLWSELDKLLKDEDDKSVATPYTAVIPEYRVVTHDPRFTTQKSMESNVANGNTTIDIHHPCRVDVAVQKELHTHESDRSCIHLEFDISRTGITYETGDHVGVYAENHVEIVEEAGKLLGHSLDLVFSIHADKEDGSPLESAVPPPFPGPCTLGTGLARYADLLNPPRKSALVALAAYATEPSEAEKLKHLTSPDGKDEYSQWIVASQRSLLEVMAAFPSAKPPLGVFFAAIAPRLQPRYYSISSSPRLAPSRVHVTSALVYGPTPTGRIHKGVCSTWMKNAVPAEKSHECSGAPIFIRASNFKLPSNPSTPIVMVGPGTGLAPFRGFLQERMALKEDGEELGSSLLFFGCRNRQMDFIYEDELNNFVDQGVISELIMAFSREGAQKEYVQHKMMEKAAQVWDLIKEEGYLYVCGDAKGMARDVHRTLHTIVQEQEGVSSSEAEAIVKKLQTEGRYLRDVW

SEQ ID NO: 623 - protein, 1145 aa, Artificial Sequence
  G8H-CPR engineered fusion
MDYLTIILTLLFALTLYEAFSYLSRRTKNLPPGPSPLPFIGSLHLLGDQPHKSLAKLSKKHGPIMSLKLGQITTIVISSSTMAKEVLQKQDLAFSSRSVPNALHAHNQFKFSVVWLPVASRWRSLRKVLNSNIFSGNRLDANQHLRTRKVQELIAYCRKNSQSGEAVDVGRAAFRTSLNLLSNLIFSKDLTDPYSDSAKEFKDLVWNIMVEAGKPNLVDFFPLLEKVDPQGIRHRMTIHFGEVLKLFGGLVNERLEQRRSKGEKNDVLDVLLTTSQESPEEIDRTHIERMCLDLFVAGTDTTSSTLEWAMSEMLKNPDKMKKTQDELAQVIGRGKTIEESDINRLPYLRCVMKETLRIHPPVPFLIPRKVEQSVEVCGYNVPKGSQVLVNAWAIGRDETVWDDALAFKPERFMESELDIRGRDFELIPFGAGRRICPGLPLALRTVPLMLGSLLNSFNWKLEGGMAPKDLDMEEKFGITLQKAHPLRAVPSTLGSTSSGWRRSSGSGKKVVEPPKLIVPKSVVEPEEIDEGKKKFTIFFGTQTGTAEGFAKALAEEAKARYEKAVIKVIDIDDYAADDEEYEEKFRKETLAFFILATYGDGEPTDNAARFYKWFVEGNDRGDWLKNLQYGVFGLGNRQYEHFNKIAKVVDEKVAEQGGKRIVPLVLGDDDQCIEDDFAAWRENVWPELDNLLRDEDDTTVSTTYTAAIPEYRVVFPDKSDSLISEANGHANGYANGNTVYDAQHPCRSNVAVRKELHTPASDRSCTHLDFDIAGTGLSYGTGDHVGVYCDNLSETVEEAERLLNLPPETYFSLHADKEDGTPLAGSSLPPPFPPCTLRTALTRYADLLNTPKKSALLALAAYASDPNEADRLKYLASPAGKDEYAQSLVANQRSLLEVMAEFPSAKPPLGVFFAAIAPRLQPRFYSISSSPRMAPSRIHVTCALVYEKTPGGRIHKGVCSTWMKNAIPLEESRDCSWAPIFVRQSNFKLPADPKVPVIMIGPGTGLAPFRGFLQERLALKEEGAELGTAVFFFGCRNRKMDYIYEDELNHFLEIGALSELLVAFSREGPTKQYVQHKMAEKASDIWRMISDGAYVYVCGDAKGMARDVHRTLHTIAQEQGSMDSTQAEGFVKNLQMTGRYLRDVW

SEQ ID NO: 624 - protein, 1145 aa, Artificial Sequence
  G8H-CPR engineered fusion
MDYLTIILTLLFALTLYEAFSYLSRRTKNLPPGPSPLPFIGSLHLLGDQPHKSLAKLSKKHGPIMSLKLGQITTIVISSSTMAKEVLQKQDLAFSSRSVPNALHAHNQFKFSVVWLPVASRWRSLRKVLNSNIFSGNRLDANQHLRTRKVQELIAYCRKNSQSGEAVDVGRAAFRTSLNLLSNLIFSKDLTDPYSDSAKEFKDLVWNIMVEAGKPNLVDFFPLLEKVDPQGIRHRMTIHFGEVLKLFGGLVNERLEQRRSKGEKNDVLDVLLTTSQESPEEIDRTHIERMCLDLFVAGTDTTSSTLEWAMSEMLKNPDKMKKTQDELAQVIGRGKTIEESDINRLPYLRCVMKETLRIHPPVPFLIPRKVEQSVEVCGYNVPKGSQVLVNAWAIGRDETVWDDALAFKPERFMESELDIRGRDFELIPFGAGRRICPGLPLALRTVPLMLGSLLNSFNWKLEGGMAPKDLDMEEKFGITLQKAHPLRAVPSTLGSTSSGSSGGWKKTTADRSGELKPLMIPKSLMAKDEDDDLDLGSGKTRVSIFFGTQTGTAEGFAKALSEEIKARYEKAAVKDDYAADDDQYEEKLKKETLAFFCVATYGDGEPTDNAARFYKWFTEENERDIKLQQLAYGVFALGNRQYEHFNKIGIVLDEELCKKGAKRLIEVGLGDDDQSIEDDFNAWKESLWSELDKLLKDEDDKSVATPYTAVIPEYRVVTHDPRFTTQKSMESNVANGNTTIDIHHPCRVDVAVQKELHTHESDRSCIHLEFDISRTGITYETGDHVGVYAENHVEIVEEAGKLLGHSLDLVFSIHADKEDGSPLESAVPPPFPGPCTLGTGLARYADLLNPPRKSALVALAAYATEPSEAEKLKHLTSPDGKDEYSQWIVASQRSLLEVMAAFPSAKPPLGVFFAAIAPRLQPRYYSISSSPRLAPSRVHVTSALVYGPTPTGRIHKGVCSTWMKNAVPAEKSHECSGAPIFIRASNFKLPSNPSTPIVMVGPGTGLAPFRGFLQERMALKEDGEELGSSLLFFGCRNRQMDFIYEDELNNFVDQGVISELIMAFSREGAQKEYVQHKMMEKAAQVWDLIKEEGYLYVCGDAKGMARDVHRTLHTIVQEQEGVSSSEAEAIVKKLQTEGRYLRDVW

SEQ ID NO: 625 - protein, 1149 aa, Artificial Sequence
  G8H-CPR engineered fusion
MDYLTIILTLLFALTLYEAFSYLSRRTKNLPPGPSPLPFIGSLHLLGDQPHKSLAKLSKKHGPIMSLKLGQITTIVISSSTMAKEVLQKQDLAFSSRSVPNALHAHNQFKFSVVWLPVASRWRSLRKVLNSNIFSGNRLDANQHLRTRKVQELIAYCRKNSQSGEAVDVGRAAFRTSLNLLSNLIFSKDLTDPYSDSAKEFKDLVWNIMVEAGKPNLVDFFPLLEKVDPQGIRHRMTIHFGEVLKLFGGLVNERLEQRRSKGEKNDVLDVLLTTSQESPEEIDRTHIERMCLDLFVAGTDTTSSTLEWAMSEMLKNPDKMKKTQDELAQVIGRGKTIEESDINRLPYLRCVMKETLRIHPPVPFLIPRKVEQSVEVCGYNVPKGSQVLVNAWAIGRDETVWDDALAFKPERFMESELDIRGRDFELIPFGAGRRICPGLPLALRTVPLMLGSLLNSFNWKLEGGMAPKDLDMEEKFGITLQKAHPLRAVPSTLGSTSSGSSGGWRRSSGSGKKVVEPPKLIVPKSVVEPEEIDEGKKKFTIFFGTQTGTAEGFAKALAEEAKARYEKAVIKVIDIDDYAADDEEYEEKFRKETLAFFILATYGDGEPTDNAARFYKWFVEGNDRGDWLKNLQYGVFGLGNRQYEHFNKIAKVVDEKVAEQGGKRIVPLVLGDDDQCIEDDFAAWRENVWPELDNLLRDEDDTTVSTTYTAAIPEYRVVFPDKSDSLISEANGHANGYANGNTVYDAQHPCRSNVAVRKELHTPASDRSCTHLDFDIAGTGLSYGTGDHVGVYCDNLSETVEEAERLLNLPPETYFSLHADKEDGTPLAGSSLPPPFPPCTLRTALTRYADLLNTPKKSALLALAAYASDPNEADRLKYLASPAGKDEYAQSLVANQRSLLEVMAEFPSAKPPLGVFFAAIAPRLQPRFYSISSSPRMAPSRIHVTCALVYEKTPGGRIHKGVCSTWMKNAIPLEESRDCSWAPIFVRQSNFKLPADPKVPVIMIGPGTGLAPFRGFLQERLALKEEGAELGTAVFFFGCRNRKMDYIYEDELNHFLEIGALSELLVAFSREGPTKQYVQHKMAEKASDIWRMISDGAYVYVCGDAKGMARDVHRTLHTIAQEQGSMDSTQAEGFVKNLQMTGRYLRDVW

SEQ ID NO: 626 - protein, 1150 aa, Artificial Sequence
  G8H-CPR engineered fusion
MDYLTIILTLLFALTLYEAFSYLSRRTKNLPPGPSPLPFIGSLHLLGDQPHKSLAKLSKKHGPIMSLKLGQITTIVISSSTMAKEVLQKQDLAFSSRSVPNALHAHNQFKFSVVWLPVASRWRSLRKVLNSNIFSGNRLDANQHLRTRKVQELIAYCRKNSQSGEAVDVGRAAFRTSLNLLSNLIFSKDLTDPYSDSAKEFKDLVWNIMVEAGKPNLVDFFPLLEKVDPQGIRHRMTIHFGEVLKLFGGLVNERLEQRRSKGEKNDVLDVLLTTSQESPEEIDRTHIERMCLDLFVAGTDTTSSTLEWAMSEMLKNPDKMKKTQDELAQVIGRGKTIEESDINRLPYLRCVMKETLRIHPPVPFLIPRKVEQSVEVCGYNVPKGSQVLVNAWAIGRDETVWDDALAFKPERFMESELDIRGRDFELIPFGAGRRICPGLPLALRTVPLMLGSLLNSFNWKLEGGMAPKDLDMEEKFGITLQKAHPLRAVPSTLGGGSGGSTSSGSSGGWKKTTADRSGELKPLMIPKSLMAKDEDDDLDLGSGKTRVSIFFGTQTGTAEGFAKALSEEIKARYEKAAVKDDYAADDDQYEEKLKKETLAFFCVATYGDGEPTDNAARFYKWFTEENERDIKLQQLAYGVFALGNRQYEHFNKIGIVLDEELCKKGAKRLIEVGLGDDDQSIEDDFNAWKESLWSELDKLLKDEDDKSVATPYTAVIPEYRVVTHDPRFTTQKSMESNVANGNTTIDIHHPCRVDVAVQKELHTHESDRSCIHLEFDISRTGITYETGDHVGVYAENHVEIVEEAGKLLGHSLDLVFSIHADKEDGSPLESAVPPPFPGPCTLGTGLARYADLLNPPRKSALVALAAYATEPSEAEKLKHLTSPDGKDEYSQWIVASQRSLLEVMAAFPSAKPPLGVFFAAIAPRLQPRYYSISSSPRLAPSRVHVTSALVYGPTPTGRIHKGVCSTWMKNAVPAEKSHECSGAPIFIRASNFKLPSNPSTPIVMVGPGTGLAPFRGFLQERMALKEDGEELGSSLLFFGCRNRQMDFIYEDELNNFVDQGVISELIMAFSREGAQKEYVQHKMMEKAAQVWDLIKEEGYLYVCGDAKGMARDVHRTLHTIVQEQEGVSSSEAEAIVKKLQTEGRYLRDVW

SEQ ID NO: 627 - protein, 1154 aa, Artificial Sequence
  G8H-CPR engineered fusion
MDYLTIILTLLFALTLYEAFSYLSRRTKNLPPGPSPLPFIGSLHLLGDQPHKSLAKLSKKHGPIMSLKLGQITTIVISSSTMAKEVLQKQDLAFSSRSVPNALHAHNQFKFSVVWLPVASRWRSLRKVLNSNIFSGNRLDANQHLRTRKVQELIAYCRKNSQSGEAVDVGRAAFRTSLNLLSNLIFSKDLTDPYSDSAKEFKDLVWNIMVEAGKPNLVDFFPLLEKVDPQGIRHRMTIHFGEVLKLFGGLVNERLEQRRSKGEKNDVLDVLLTTSQESPEEIDRTHIERMCLDLFVAGTDTTSSTLEWAMSEMLKNPDKMKKTQDELAQVIGRGKTIEESDINRLPYLRCVMKETLRIHPPVPFLIPRKVEQSVEVCGYNVPKGSQVLVNAWAIGRDETVWDDALAFKPERFMESELDIRGRDFELIPFGAGRRICPGLPLALRTVPLMLGSLLNSFNWKLEGGMAPKDLDMEEKFGITLQKAHPLRAVPSTLGGGSGGSTSSGSSGGWRRSSGSGKKVVEPPKLIVPKSVVEPEEIDEGKKKFTIFFGTQTGTAEGFAKALAEEAKARYEKAVIKVIDIDDYAADDEEYEEKFRKETLAFFILATYGDGEPTDNAARFYKWFVEGNDRGDWLKNLQYGVFGLGNRQYEHFNKIAKVVDEKVAEQGGKRIVPLVLGDDDQCIEDDFAAWRENVWPELDNLLRDEDDTTVSTTYTAAIPEYRVVFPDKSDSLISEANGHANGYANGNTVYDAQHPCRSNVAVRKELHTPASDRSCTHLDFDIAGTGLSYGTGDHVGVYCDNLSETVEEAERLLNLPPETYFSLHADKEDGTPLAGSSLPPPFPPCTLRTALTRYADLLNTPKKSALLALAAYASDPNEADRLKYLASPAGKDEYAQSLVANQRSLLEVMAEFPSAKPPLGVFFAAIAPRLQPRFYSISSSPRMAPSRIHVTCALVYEKTPGGRIHKGVCSTWMKNAIPLEESRDCSWAPIFVRQSNFKLPADPKVPVIMIGPGTGLAPFRGFLQERLALKEEGAELGTAVFFFGCRNRKMDYIYEDELNHFLEIGALSELLVAFSREGPTKQYVQHKMAEKASDIWRMISDGAYVYVCGDAKGMARDVHRTLHTIAQEQGSMDSTQAEGFVKNLQMTGRYLRDVW

SEQ ID NO: 628 - protein, 1140 aa, Artificial Sequence
  G8H-CPR engineered fusion
MDFLTIFIGPLLAIIALFYARLTISTRGKNLPPGPTPLPFIGNLHLLGHHPHKSLARLAKTYGPLMLLRLGSENTVVVSSAAVAKEVLQKHDLAFSSRSIPDAVHAHDQFKYSVVWLPVASRWRSLRKTMNSNIFSGSCLDANQHLRSRKVEELIAYCKESCRRAEAVDVGRAAFRTALNSLSNTIFSRDLADPLSDSGKEFKDVVSSIMMEAGKPNSVDYYPFLSRFDPQGIRRRTAIYFDKLINIFKGLIDERLEKRRSQYEEATDVIDILLNTIEQNPEEIDRTHIERMFLDLFLAGTDTTSSTVEWAMAEAMKNPETMKKAKAELAQVIGKGKIVQETDIPHLPYLQCIVKETLRLHPPVPFLIPRRVHEDVDILGYVVPNNSQVFVNMWAIGRDPDMWKNPLQFDPDRFHDSEVGLRGKDFELIPFGAGRRICPGLPLAMRMVPVVLGSLLNSFDWKVEGGKELEMNEKFGITLEKAQPLMAVPIALGSTSSGWKKTTADRSGELKPLMIPKSLMAKDEDDDLDLGSGKTRVSIFFGTQTGTAEGFAKALSEEIKARYEKAAVKDDYAADDDQYEEKLKKETLAFFCVATYGDGEPTDNAARFYKWFTEENERDIKLQQLAYGVFALGNRQYEHFNKIGIVLDEELCKKGAKRLIEVGLGDDDQSIEDDFNAWKESLWSELDKLLKDEDDKSVATPYTAVIPEYRVVTHDPRFTTQKSMESNVANGNTTIDIHHPCRVDVAVQKELHTHESDRSCIHLEFDISRTGITYETGDHVGVYAENHVEIVEEAGKLLGHSLDLVFSIHADKEDGSPLESAVPPPFPGPCTLGTGLARYADLLNPPRKSALVALAAYATEPSEAEKLKHLTSPDGKDEYSQWIVASQRSLLEVMAAFPSAKPPLGVFFAAIAPRLQPRYYSISSSPRLAPSRVHVTSALVYGPTPTGRIHKGVCSTWMKNAVPAEKSHECSGAPIFIRASNFKLPSNPSTPIVMVGPGTGLAPFRGFLQERMALKEDGEELGSSLLFFGCRNRQMDFIYEDELNNFVDQGVISELIMAFSREGAQKEYVQHKMMEKAAQVWDLIKEEGYLYVCGDAKGMARDVHRTLHTIVQEQEGVSSSEAEAIVKKLQTEGRYLRDVW

SEQ ID NO: 629 - protein, 1144 aa, Artificial Sequence
  G8H-CPR engineered fusion
MDFLTIFIGPLLAIIALFYARLTISTRGKNLPPGPTPLPFIGNLHLLGHHPHKSLARLAKTYGPLMLLRLGSENTVVVSSAAVAKEVLQKHDLAFSSRSIPDAVHAHDQFKYSVVWLPVASRWRSLRKTMNSNIFSGSCLDANQHLRSRKVEELIAYCKESCRRAEAVDVGRAAFRTALNSLSNTIFSRDLADPLSDSGKEFKDVVSSIMMEAGKPNSVDYYPFLSRFDPQGIRRRTAIYFDKLINIFKGLIDERLEKRRSQYEEATDVIDILLNTIEQNPEEIDRTHIERMFLDLFLAGTDTTSSTVEWAMAEAMKNPETMKKAKAELAQVIGKGKIVQETDIPHLPYLQCIVKETLRLHPPVPFLIPRRVHEDVDILGYVVPNNSQVFVNMWAIGRDPDMWKNPLQFDPDRFHDSEVGLRGKDFELIPFGAGRRICPGLPLAMRMVPVVLGSLLNSFDWKVEGGKELEMNEKFGITLEKAQPLMAVPIALGSTSSGWRRSSGSGKKVVEPPKLIVPKSVVEPEEIDEGKKKFTIFFGTQTGTAEGFAKALAEEAKARYEKAVIKVIDIDDYAADDEEYEEKFRKETLAFFILATYGDGEPTDNAARFYKWFVEGNDRGDWLKNLQYGVFGLGNRQYEHFNKIAKVVDEKVAEQGGKRIVPLVLGDDDQCIEDDFAAWRENVWPELDNLLRDEDDTTVSTTYTAAIPEYRVVFPDKSDSLISEANGHANGYANGNTVYDAQHPCRSNVAVRKELHTPASDRSCTHLDFDIAGTGLSYGTGDHVGVYCDNLSETVEEAERLLNLPPETYFSLHADKEDGTPLAGSSLPPPFPPCTLRTALTRYADLLNTPKKSALLALAAYASDPNEADRLKYLASPAGKDEYAQSLVANQRSLLEVMAEFPSAKPPLGVFFAAIAPRLQPRFYSISSSPRMAPSRIHVTCALVYEKTPGGRIHKGVCSTWMKNAIPLEESRDCSWAPIFVRQSNFKLPADPKVPVIMIGPGTGLAPFRGFLQERLALKEEGAELGTAVFFFGCRNRKMDYIYEDELNHFLEIGALSELLVAFSREGPTKQYVQHKMAEKASDIWRMISDGAYVYVCGDAKGMARDVHRTLHTIAQEQGSMDSTQAEGFVKNLQMTGRYLRDVW

SEQ ID NO: 630 - protein, 1144 aa, Artificial Sequence
  G8H-CPR engineered fusion
MDFLTIFIGPLLAIIALFYARLTISTRGKNLPPGPTPLPFIGNLHLLGHHPHKSLARLAKTYGPLMLLRLGSENTVVVSSAAVAKEVLQKHDLAFSSRSIPDAVHAHDQFKYSVVWLPVASRWRSLRKTMNSNIFSGSCLDANQHLRSRKVEELIAYCKESCRRAEAVDVGRAAFRTALNSLSNTIFSRDLADPLSDSGKEFKDVVSSIMMEAGKPNSVDYYPFLSRFDPQGIRRRTAIYFDKLINIFKGLIDERLEKRRSQYEEATDVIDILLNTIEQNPEEIDRTHIERMFLDLFLAGTDTTSSTVEWAMAEAMKNPETMKKAKAELAQVIGKGKIVQETDIPHLPYLQCIVKETLRLHPPVPFLIPRRVHEDVDILGYVVPNNSQVFVNMWAIGRDPDMWKNPLQFDPDRFHDSEVGLRGKDFELIPFGAGRRICPGLPLAMRMVPVVLGSLLNSFDWKVEGGKELEMNEKFGITLEKAQPLMAVPIALGSTSSGSSGGWKKTTADRSGELKPLMIPKSLMAKDEDDDLDLGSGKTRVSIFFGTQTGTAEGFAKALSEEIKARYEKAAVKDDYAADDDQYEEKLKKETLAFFCVATYGDGEPTDNAARFYKWFTEENERDIKLQQLAYGVFALGNRQYEHFNKIGIVLDEELCKKGAKRLIEVGLGDDDQSIEDDFNAWKESLWSELDKLLKDEDDKSVATPYTAVIPEYRVVTHDPRFTTQKSMESNVANGNTTIDIHHPCRVDVAVQKELHTHESDRSCIHLEFDISRTGITYETGDHVGVYAENHVEIVEEAGKLLGHSLDLVFSIHADKEDGSPLESAVPPPFPGPCTLGTGLARYADLLNPPRKSALVALAAYATEPSEAEKLKHLTSPDGKDEYSQWIVASQRSLLEVMAAFPSAKPPLGVFFAAIAPRLQPRYYSISSSPRLAPSRVHVTSALVYGPTPTGRIHKGVCSTWMKNAVPAEKSHECSGAPIFIRASNFKLPSNPSTPIVMVGPGTGLAPFRGFLQERMALKEDGEELGSSLLFFGCRNRQMDFIYEDELNNFVDQGVISELIMAFSREGAQKEYVQHKMMEKAAQVWDLIKEEGYLYVCGDAKGMARDVHRTLHTIVQEQEGVSSSEAEAIVKKLQTEGRYLRDVW

SEQ ID NO: 631 - protein, 1148 aa, Artificial Sequence
  G8H-CPR engineered fusion
MDFLTIFIGPLLAIIALFYARLTISTRGKNLPPGPTPLPFIGNLHLLGHHPHKSLARLAKTYGPLMLLRLGSENTVVVSSAAVAKEVLQKHDLAFSSRSIPDAVHAHDQFKYSVVWLPVASRWRSLRKTMNSNIFSGSCLDANQHLRSRKVEELIAYCKESCRRAEAVDVGRAAFRTALNSLSNTIFSRDLADPLSDSGKEFKDVVSSIMMEAGKPNSVDYYPFLSRFDPQGIRRRTAIYFDKLINIFKGLIDERLEKRRSQYEEATDVIDILLNTIEQNPEEIDRTHIERMFLDLFLAGTDTTSSTVEWAMAEAMKNPETMKKAKAELAQVIGKGKIVQETDIPHLPYLQCIVKETLRLHPPVPFLIPRRVHEDVDILGYVVPNNSQVFVNMWAIGRDPDMWKNPLQFDPDRFHDSEVGLRGKDFELIPFGAGRRICPGLPLAMRMVPVVLGSLLNSFDWKVEGGKELEMNEKFGITLEKAQPLMAVPIALGSTSSGSSGGWRRSSGSGKKVVEPPKLIVPKSVVEPEEIDEGKKKFTIFFGTQTGTAEGFAKALAEEAKARYEKAVIKVIDIDDYAADDEEYEEKFRKETLAFFILATYGDGEPTDNAARFYKWFVEGNDRGDWLKNLQYGVFGLGNRQYEHFNKIAKVVDEKVAEQGGKRIVPLVLGDDDQCIEDDFAAWRENVWPELDNLLRDEDDTTVSTTYTAAIPEYRVVFPDKSDSLISEANGHANGYANGNTVYDAQHPCRSNVAVRKELHTPASDRSCTHLDFDIAGTGLSYGTGDHVGVYCDNLSETVEEAERLLNLPPETYFSLHADKEDGTPLAGSSLPPPFPPCTLRTALTRYADLLNTPKKSALLALAAYASDPNEADRLKYLASPAGKDEYAQSLVANQRSLLEVMAEFPSAKPPLGVFFAAIAPRLQPRFYSISSSPRMAPSRIHVTCALVYEKTPGGRIHKGVCSTWMKNAIPLEESRDCSWAPIFVRQSNFKLPADPKVPVIMIGPGTGLAPFRGFLQERLALKEEGAELGTAVFFFGCRNRKMDYIYEDELNHFLEIGALSELLVAFSREGPTKQYVQHKMAEKASDIWRMISDGAYVYVCGDAKGMARDVHRTLHTIAQEQGSMDSTQAEGFVKNLQMTGRYLRDVW

SEQ ID NO: 632 - protein, 1149 aa, Artificial Sequence
  G8H-CPR engineered fusion
MDFLTIFIGPLLAIIALFYARLTISTRGKNLPPGPTPLPFIGNLHLLGHHPHKSLARLAKTYGPLMLLRLGSENTVVVSSAAVAKEVLQKHDLAFSSRSIPDAVHAHDQFKYSVVWLPVASRWRSLRKTMNSNIFSGSCLDANQHLRSRKVEELIAYCKESCRRAEAVDVGRAAFRTALNSLSNTIFSRDLADPLSDSGKEFKDVVSSIMMEAGKPNSVDYYPFLSRFDPQGIRRRTAIYFDKLINIFKGLIDERLEKRRSQYEEATDVIDILLNTIEQNPEEIDRTHIERMFLDLFLAGTDTTSSTVEWAMAEAMKNPETMKKAKAELAQVIGKGKIVQETDIPHLPYLQCIVKETLRLHPPVPFLIPRRVHEDVDILGYVVPNNSQVFVNMWAIGRDPDMWKNPLQFDPDRFHDSEVGLRGKDFELIPFGAGRRICPGLPLAMRMVPVVLGSLLNSFDWKVEGGKELEMNEKFGITLEKAQPLMAVPIALGGGSGGSTSSGSSGGWKKTTADRSGELKPLMIPKSLMAKDEDDDLDLGSGKTRVSIFFGTQTGTAEGFAKALSEEIKARYEKAAVKDDYAADDDQYEEKLKKETLAFFCVATYGDGEPTDNAARFYKWFTEENERDIKLQQLAYGVFALGNRQYEHFNKIGIVLDEELCKKGAKRLIEVGLGDDDQSIEDDFNAWKESLWSELDKLLKDEDDKSVATPYTAVIPEYRVVTHDPRFTTQKSMESNVANGNTTIDIHHPCRVDVAVQKELHTHESDRSCIHLEFDISRTGITYETGDHVGVYAENHVEIVEEAGKLLGHSLDLVFSIHADKEDGSPLESAVPPPFPGPCTLGTGLARYADLLNPPRKSALVALAAYATEPSEAEKLKHLTSPDGKDEYSQWIVASQRSLLEVMAAFPSAKPPLGVFFAAIAPRLQPRYYSISSSPRLAPSRVHVTSALVYGPTPTGRIHKGVCSTWMKNAVPAEKSHECSGAPIFIRASNFKLPSNPSTPIVMVGPGTGLAPFRGFLQERMALKEDGEELGSSLLFFGCRNRQMDFIYEDELNNFVDQGVISELIMAFSREGAQKEYVQHKMMEKAAQVWDLIKEEGYLYVCGDAKGMARDVHRTLHTIVQEQEGVSSSEAEAIVKKLQTEGRYLRDVW

SEQ ID NO: 633 - protein, 1153 aa, Artificial Sequence
  G8H-CPR engineered fusion
MDFLTIFIGPLLAIIALFYARLTISTRGKNLPPGPTPLPFIGNLHLLGHHPHKSLARLAKTYGPLMLLRLGSENTVVVSSAAVAKEVLQKHDLAFSSRSIPDAVHAHDQFKYSVVWLPVASRWRSLRKTMNSNIFSGSCLDANQHLRSRKVEELIAYCKESCRRAEAVDVGRAAFRTALNSLSNTIFSRDLADPLSDSGKEFKDVVSSIMMEAGKPNSVDYYPFLSRFDPQGIRRRTAIYFDKLINIFKGLIDERLEKRRSQYEEATDVIDILLNTIEQNPEEIDRTHIERMFLDLFLAGTDTTSSTVEWAMAEAMKNPETMKKAKAELAQVIGKGKIVQETDIPHLPYLQCIVKETLRLHPPVPFLIPRRVHEDVDILGYVVPNNSQVFVNMWAIGRDPDMWKNPLQFDPDRFHDSEVGLRGKDFELIPFGAGRRICPGLPLAMRMVPVVLGSLLNSFDWKVEGGKELEMNEKFGITLEKAQPLMAVPIALGGGSGGSTSSGSSGGWRRSSGSGKKVVEPPKLIVPKSVVEPEEIDEGKKKFTIFFGTQTGTAEGFAKALAEEAKARYEKAVIKVIDIDDYAADDEEYEEKFRKETLAFFILATYGDGEPTDNAARFYKWFVEGNDRGDWLKNLQYGVFGLGNRQYEHFNKIAKVVDEKVAEQGGKRIVPLVLGDDDQCIEDDFAAWRENVWPELDNLLRDEDDTTVSTTYTAAIPEYRVVFPDKSDSLISEANGHANGYANGNTVYDAQHPCRSNVAVRKELHTPASDRSCTHLDFDIAGTGLSYGTGDHVGVYCDNLSETVEEAERLLNLPPETYFSLHADKEDGTPLAGSSLPPPFPPCTLRTALTRYADLLNTPKKSALLALAAYASDPNEADRLKYLASPAGKDEYAQSLVANQRSLLEVMAEFPSAKPPLGVFFAAIAPRLQPRFYSISSSPRMAPSRIHVTCALVYEKTPGGRIHKGVCSTWMKNAIPLEESRDCSWAPIFVRQSNFKLPADPKVPVIMIGPGTGLAPFRGFLQERLALKEEGAELGTAVFFFGCRNRKMDYIYEDELNHFLEIGALSELLVAFSREGPTKQYVQHKMAEKASDIWRMISDGAYVYVCGDAKGMARDVHRTLHTIAQEQGSMDSTQAEGFVKNLQMTGRYLRDVW

SEQ ID NO: 634 - protein, 1141 aa, Artificial Sequence
  G8H-CPR engineered fusion
MALLLAVFRLTISTRGKNLPPGPTPLPFIGNLHLLGHHPHKSLARLAKTYGPLMLLRLGSENTVVVSSAAVAKEVLQKHDLAFSSRSIPDAVHAHDQFKYSVVWLPVASRWRSLRKTMNSNIFSGSCLDANQHLRSRKVEELIAYCKESCRRAEAVDVGRAAFRTALNSLSNTIFSRDLADPLSDSGKEFKDVVSSIMMEAGKPNSVDYYPFLSRFDPQGIRRRTAIYFDKLINIFKGLIDERLEKRRSQYEEATDVIDILLNTIEQNPEEIDRTHIERMFLDLFLAGTDTTSSTVEWAMAEAMKNPETMKKAKAELAQVIGKGKIVQETDIPHLPYLQCIVKETLRLHPPVPFLIPRRVHEDVDILGYVVPNNSQVFVNMWAIGRDPDMWKNPLQFDPDRFHDSEVGLRGKDFELIPFGAGRRICPGLPLAMRMVPVVLGSLLNSFDWKVEGGKELEMNEKFGITLEKAQPLMAVPIALGGGSGGSTSSGSSGGWRRSSGSGKKVVEPPKLIVPKSVVEPEEIDEGKKKFTIFFGTQTGTAEGFAKALAEEAKARYEKAVIKVIDIDDYAADDEEYEEKFRKETLAFFILATYGDGEPTDNAARFYKWFVEGNDRGDWLKNLQYGVFGLGNRQYEHFNKIAKVVDEKVAEQGGKRIVPLVLGDDDQCIEDDFAAWRENVWPELDNLLRDEDDTTVSTTYTAAIPEYRVVFPDKSDSLISEANGHANGYANGNTVYDAQHPCRSNVAVRKELHTPASDRSCTHLDFDIAGTGLSYGTGDHVGVYCDNLSETVEEAERLLNLPPETYFSLHADKEDGTPLAGSSLPPPFPPCTLRTALTRYADLLNTPKKSALLALAAYASDPNEADRLKYLASPAGKDEYAQSLVANQRSLLEVMAEFPSAKPPLGVFFAAIAPRLQPRFYSISSSPRMAPSRIHVTCALVYEKTPGGRIHKGVCSTWMKNAIPLEESRDCSWAPIFVRQSNFKLPADPKVPVIMIGPGTGLAPFRGFLQERLALKEEGAELGTAVFFFGCRNRKMDYIYEDELNHFLEIGALSELLVAFSREGPTKQYVQHKMAEKASDIWRMISDGAYVYVCGDAKGMARDVHRTLHTIAQEQGSMDSTQAEGFVKNLQMTGRYLRDVW

SEQ ID NO: 635 - protein, 1136 aa, Artificial Sequence
  G8H-CPR engineered fusion
MDFLTIFIGPLLAIIALFYARLTISTRGKNLPPGPTPLPFIGNLHLLGHHPHKSLARLAKTYGPLMLLRLGSENTVVVSSAAVAKEVLQKHDLAFSSRSIPDAVHAHDQFKYSVVWLPVASRWRSLRKTMNSNIFSGSCLDANQHLRSRKVEELIAYCKESCRRAEAVDVGRAAFRTALNSLSNTIFSRDLADPLSDSGKEFKDVVSSIMMEAGKPNSVDYYPFLSRFDPQGIRRRTAIYFDKLINIFKGLIDERLEKRRSQYEEATDVIDILLNTIEQNPEEIDRTHIERMFLDLFLAGTDTTSSTVEWAMAEAMKNPETMKKAKAELAQVIGKGKIVQETDIPHLPYLQCIVKETLRLHPPVPFLIPRRVHEDVDILGYVVPNNSQVFVNMWAIGRDPDMWKNPLQFDPDRFHDSEVGLRGKDFELIPFGAGRRICPGLPLAMRMVPVVLGSLLNSFDWKVEGGKELEMNEKFGGGSGGSTSSGSSGGWRRSSGSGKKVVEPPKLIVPKSVVEPEEIDEGKKKFTIFFGTQTGTAEGFAKALAEEAKARYEKAVIKVIDIDDYAADDEEYEEKFRKETLAFFILATYGDGEPTDNAARFYKWFVEGNDRGDWLKNLQYGVFGLGNRQYEHFNKIAKVVDEKVAEQGGKRIVPLVLGDDDQCIEDDFAAWRENVWPELDNLLRDEDDTTVSTTYTAAIPEYRVVFPDKSDSLISEANGHANGYANGNTVYDAQHPCRSNVAVRKELHTPASDRSCTHLDFDIAGTGLSYGTGDHVGVYCDNLSETVEEAERLLNLPPETYFSLHADKEDGTPLAGSSLPPPFPPCTLRTALTRYADLLNTPKKSALLALAAYASDPNEADRLKYLASPAGKDEYAQSLVANQRSLLEVMAEFPSAKPPLGVFFAAIAPRLQPRFYSISSSPRMAPSRIHVTCALVYEKTPGGRIHKGVCSTWMKNAIPLEESRDCSWAPIFVRQSNFKLPADPKVPVIMIGPGTGLAPFRGFLQERLALKEEGAELGTAVFFFGCRNRKMDYIYEDELNHFLEIGALSELLVAFSREGPTKQYVQHKMAEKASDIWRMISDGAYVYVCGDAKGMARDVHRTLHTIAQEQGSMDSTQAEGFVKNLQMTGRYLRDVW

SEQ ID NO: 636 - protein, 1139 aa, Artificial Sequence
  G8H-CPR engineered fusion
MDFLTIFIGPLLAIIALFYARLTISTRGKNLPPGPTPLPFIGNLHLLGHHPHKSLARLAKTYGPLMLLRLGSENTVVVSSAAVAKEVLQKHDLAFSSRSIPDAVHAHDQFKYSVVWLPVASRWRSLRKTMNSNIFSGSCLDANQHLRSRKVEELIAYCKESCRRAEAVDVGRAAFRTALNSLSNTIFSRDLADPLSDSGKEFKDVVSSIMMEAGKPNSVDYYPFLSRFDPQGIRRRTAIYFDKLINIFKGLIDERLEKRRSQYEEATDVIDILLNTIEQNPEEIDRTHIERMFLDLFLAGTDTTSSTVEWAMAEAMKNPETMKKAKAELAQVIGKGKIVQETDIPHLPYLQCIVKETLRLHPPVPFLIPRRVHEDVDILGYVVPNNSQVFVNMWAIGRDPDMWKNPLQFDPDRFHDSEVGLRGKDFELIPFGAGRRICPGLPLAMRMVPVVLGSLLNSFDWKVEGGKELEMNEKFGITLEKAQPLMAVPIALGGGSGGSTSSGSSGGPKLIVPKSVVEPEEIDEGKKKFTIFFGTQTGTAEGFAKALAEEAKARYEKAVIKVIDIDDYAADDEEYEEKFRKETLAFFILATYGDGEPTDNAARFYKWFVEGNDRGDWLKNLQYGVFGLGNRQYEHFNKIAKVVDEKVAEQGGKRIVPLVLGDDDQCIEDDFAAWRENVWPELDNLLRDEDDTTVSTTYTAAIPEYRVVFPDKSDSLISEANGHANGYANGNTVYDAQHPCRSNVAVRKELHTPASDRSCTHLDFDIAGTGLSYGTGDHVGVYCDNLSETVEEAERLLNLPPETYFSLHADKEDGTPLAGSSLPPPFPPCTLRTALTRYADLLNTPKKSALLALAAYASDPNEADRLKYLASPAGKDEYAQSLVANQRSLLEVMAEFPSAKPPLGVFFAAIAPRLQPRFYSISSSPRMAPSRIHVTCALVYEKTPGGRIHKGVCSTWMKNAIPLEESRDCSWAPIFVRQSNFKLPADPKVPVIMIGPGTGLAPFRGFLQERLALKEEGAELGTAVFFFGCRNRKMDYIYEDELNHFLEIGALSELLVAFSREGPTKQYVQHKMAEKASDIWRMISDGAYVYVCGDAKGMARDVHRTLHTIAQEQGSMDSTQAEGFVKNLQMTGRYLRDVW

SEQ ID NO: 637 - protein, 1117 aa, Artificial Sequence
  G8H-CPR engineered fusion
MDFLTIFIGPLLAIIALFYARLTISTRGKNLPPGPTPLPFIGNLHLLGHHPHKSLARLAKTYGPLMLLRLGSENTVVVSSAAVAKEVLQKHDLAFSSRSIPDAVHAHDQFKYSVVWLPVASRWRSLRKTMNSNIFSGSCLDANQHLRSRKVEELIAYCKESCRRAEAVDVGRAAFRTALNSLSNTIFSRDLADPLSDSGKEFKDVVSSIMMEAGKPNSVDYYPFLSRFDPQGIRRRTAIYFDKLINIFKGLIDERLEKRRSQYEEATDVIDILLNTIEQNPEEIDRTHIERMFLDLFLAGTDTTSSTVEWAMAEAMKNPETMKKAKAELAQVIGKGKIVQETDIPHLPYLQCIVKETLRLHPPVPFLIPRRVHEDVDILGYVVPNNSQVFVNMWAIGRDPDMWKNPLQFDPDRFHDSEVGLRGKDFELIPFGAGRRICPGLPLAMRMVPVVLGSLLNSFDWKVEGGKELEMNEKFGITLEKAQPLMAVPIALGGGSGGSTSSGSSGGTIFFGTQTGTAEGFAKALAEEAKARYEKAVIKVIDIDDYAADDEEYEEKFRKETLAFFILATYGDGEPTDNAARFYKWFVEGNDRGDWLKNLQYGVFGLGNRQYEHFNKIAKVVDEKVAEQGGKRIVPLVLGDDDQCIEDDFAAWRENVWPELDNLLRDEDDTTVSTTYTAAIPEYRVVFPDKSDSLISEANGHANGYANGNTVYDAQHPCRSNVAVRKELHTPASDRSCTHLDFDIAGTGLSYGTGDHVGVYCDNLSETVEEAERLLNLPPETYFSLHADKEDGTPLAGSSLPPPFPPCTLRTALTRYADLLNTPKKSALLALAAYASDPNEADRLKYLASPAGKDEYAQSLVANQRSLLEVMAEFPSAKPPLGVFFAAIAPRLQPRFYSISSSPRMAPSRIHVTCALVYEKTPGGRIHKGVCSTWMKNAIPLEESRDCSWAPIFVRQSNFKLPADPKVPVIMIGPGTGLAPFRGFLQERLALKEEGAELGTAVFFFGCRNRKMDYIYEDELNHFLEIGALSELLVAFSREGPTKQYVQHKMAEKASDIWRMISDGAYVYVCGDAKGMARDVHRTLHTIAQEQGSMDSTQAEGFVKNLQMTGRYLRDVW

SEQ ID NO: 638 - protein, 1151 aa, Artificial Sequence
  G8H-CPR engineered fusion
MDFLTIVLGLLFTLVLVHGLQTLSARAKKLPPGPTPLPLIGSLHLLGDQPHQSLAKLAKTHGPLMCLRLGFINTVVVSSAAMAKEVLQKQDLVFSSRTIPDAIHAHDQFKYSVVWLPVASRWRSLRKVLNSNIFSGSRLDANQHLRCRKVQELIAYCRKNSQTGEPVDVGRAAFRTSLNLLSNTIFSKDLTDPFSDSAKEFKDLVWNIMVEAGKPNLVDFFPMLEKLDPQGIRRRMTIHFGKVIDLFSGLINERLEKGKTQNAGNSDVIDILLATSKENPEEIDRVHIERMCLDLFVAGTDTTSSTLEWAMAEALKNPETVKKAKAELEEVIGKGKVLDEADISRLPYLRCMVKETLRIHPPVPFLIPRRVDQDVEVCGYTVPKNSQVFVNAWAIGRDPDVWKDPLEFKPERFLESELDMRGRDFELIPFGAGRRICPGLPLAVRMVPVMLGSLLNSFDWKLENGIGPKELDMDEKFGITLQKARPLRAVPLPLGGGSGGSTSSGSSGGWKKTTADRSGELKPLMIPKSLMAKDEDDDLDLGSGKTRVSIFFGTQTGTAEGFAKALSEEIKARYEKAAVKDDYAADDDQYEEKLKKETLAFFCVATYGDGEPTDNAARFYKWFTEENERDIKLQQLAYGVFALGNRQYEHFNKIGIVLDEELCKKGAKRLIEVGLGDDDQSIEDDFNAWKESLWSELDKLLKDEDDKSVATPYTAVIPEYRVVTHDPRFTTQKSMESNVANGNTTIDIHHPCRVDVAVQKELHTHESDRSCIHLEFDISRTGITYETGDHVGVYAENHVEIVEEAGKLLGHSLDLVFSIHADKEDGSPLESAVPPPFPGPCTLGTGLARYADLLNPPRKSALVALAAYATEPSEAEKLKHLTSPDGKDEYSQWIVASQRSLLEVMAAFPSAKPPLGVFFAAIAPRLQPRYYSISSSPRLAPSRVHVTSALVYGPTPTGRIHKGVCSTWMKNAVPAEKSHECSGAPIFIRASNFKLPSNPSTPIVMVGPGTGLAPFRGFLQERMALKEDGEELGSSLLFFGCRNRQMDFIYEDELNNFVDQGVISELIMAFSREGAQKEYVQHKMMEKAAQVWDLIKEEGYLYVCGDAKGMARDVHRTLHTIVQEQEGVSSSEAEAIVKKLQTEGRYLRDVW

SEQ ID NO: 639 - protein, 1155 aa, Artificial Sequence
  G8H-CPR engineered fusion
MDFLTIVLGLLFTLVLVHGLQTLSARAKKLPPGPTPLPLIGSLHLLGDQPHQSLAKLAKTHGPLMCLRLGFINTVVVSSAAMAKEVLQKQDLVFSSRTIPDAIHAHDQFKYSVVWLPVASRWRSLRKVLNSNIFSGSRLDANQHLRCRKVQELIAYCRKNSQTGEPVDVGRAAFRTSLNLLSNTIFSKDLTDPFSDSAKEFKDLVWNIMVEAGKPNLVDFFPMLEKLDPQGIRRRMTIHFGKVIDLFSGLINERLEKGKTQNAGNSDVIDILLATSKENPEEIDRVHIERMCLDLFVAGTDTTSSTLEWAMAEALKNPETVKKAKAELEEVIGKGKVLDEADISRLPYLRCMVKETLRIHPPVPFLIPRRVDQDVEVCGYTVPKNSQVFVNAWAIGRDPDVWKDPLEFKPERFLESELDMRGRDFELIPFGAGRRICPGLPLAVRMVPVMLGSLLNSFDWKLENGIGPKELDMDEKFGITLQKARPLRAVPLPLGGGSGGSTSSGSSGGWRRSSDRSKESNPVVVPRPLLVEAEEDEVEVGSGKTKLTIFYGTQTGTAEGFAKALAEEIKARYEKAVVKVVDLDDYADDDEQYEEKLKKETLAFFMVATYGDGEPTDNAARFYKWFTDGKERGLWLQQLKFGVFGLGNRQYEHFNKIGKVLDQDLSEQGGKRLIPVGLGDDDQCIEDDFAAWRELLWPELDQLLRDGDDTNTVSTPYTAVIPEYRVVIYDPTTTSFEDKHLSMANGNASYDIHHPCRVNVAVQRELHKPESDRSCIHLEFDISSTGITYETGDHVGVYADNCDETVEEAARLLGQPLDLLFSIHSDDDNGTPLGGSLPPPFPGPCTLRTALARYADLLNPPRKAALIALAAHAIEPSESEKLKFLSSPQGKDDYSQWVVGSQRSLLEVMAEFPSAKPPLGVFFAAVATRLQPRYYSISSSPRFAPSRVHVTCSLVYGPTSTGRIHKGVCSTWMKNAVPLEKSRNCSWAPIFIRASNFKLPSNPSIPIVMVGPGTGLAPFRGFLQERLALKEDGIQLGPALLFFGCRNRRMDFIYEDELNNFVDRGVLSDLIVAFSREGPQKEYVQHKMMEKAAYIWNLISQEGYLYVCGDAKGMARDVHRTLHTIVQEQENADTSKAESVVKKLQMDGRYLRDVW

SEQ ID NO: 640 - protein, 1155 aa, Artificial Sequence
  G8H-CPR engineered fusion
MDFLTIVLGLLFTLVLVHGLQTLSARAKKLPPGPTPLPLIGSLHLLGDQPHQSLAKLAKTHGPLMCLRLGFINTVVVSSAAMAKEVLQKQDLVFSSRTIPDAIHAHDQFKYSVVWLPVASRWRSLRKVLNSNIFSGSRLDANQHLRCRKVQELIAYCRKNSQTGEPVDVGRAAFRTSLNLLSNTIFSKDLTDPFSDSAKEFKDLVWNIMVEAGKPNLVDFFPMLEKLDPQGIRRRMTIHFGKVIDLFSGLINERLEKGKTQNAGNSDVIDILLATSKENPEEIDRVHIERMCLDLFVAGTDTTSSTLEWAMAEALKNPETVKKAKAELEEVIGKGKVLDEADISRLPYLRCMVKETLRIHPPVPFLIPRRVDQDVEVCGYTVPKNSQVFVNAWAIGRDPDVWKDPLEFKPERFLESELDMRGRDFELIPFGAGRRICPGLPLAVRMVPVMLGSLLNSFDWKLENGIGPKELDMDEKFGITLQKARPLRAVPLPLGGGSGGSTSSGSSGGWRKGAGSAKKVVEPPKLVLPKALSETEEVDDGKKKVTIFFGTQTGTAEGFAKALAEEAKARYPQANFKVVDMDDYAAEDEEYEEKLTKETMAFFFLATYGDGEPTDNAARFYKWFAEGKERGDSFKNLHYGVFGLGNRQYEHFNKIAIVVDNILAEQGGKRLVPVGLGDDDQCIEDDFAAWRENVWPELDNLLRNEDDASTVSTPYTAAVLEYRVEFHDQSDELSLENSLANGHANGNASYDAQHPCRANVAVKRELHTPLSDRSCTHLEFDISGTGLQYETGDHVGVYCENLIETVEEAERLLGLSPQTYFSVHTDKEDGTPLGGSALPPPFPPCTLRTALSRYADLLNAPKKSALTALAAYASDPTEADRLKHLASPAGKEEYAQYVVASQRTLLEVMADFPSAKPPLGVFFAGVAPRLQPRFYSISSSPKIAPFRIHVTCALVYDKTPTGRIHKGICSTWIKNAVPLEESSDCSSAPIFVRNSNFKLPSDANIPIIMIGPGTGLAPFRGFLQERLALKESGAELGPAILFFGCRNRKMDFIYEDELNDFVKAGVVSELIVAFSREGSTKEYVQHKMAQRASDVWKMISDGGYIYVCGDAKGMARDVHRTLHTIAQEQGSMSSSEAEGMVKNLQMTGRYLRDVW

SEQ ID NO: 641 - protein, 1155 aa, Artificial Sequence
  G8H-CPR engineered fusion
MDFLTIVLGLLFTLVLVHGLQTLSARAKKLPPGPTPLPLIGSLHLLGDQPHQSLAKLAKTHGPLMCLRLGFINTVVVSSAAMAKEVLQKQDLVFSSRTIPDAIHAHDQFKYSVVWLPVASRWRSLRKVLNSNIFSGSRLDANQHLRCRKVQELIAYCRKNSQTGEPVDVGRAAFRTSLNLLSNTIFSKDLTDPFSDSAKEFKDLVWNIMVEAGKPNLVDFFPMLEKLDPQGIRRRMTIHFGKVIDLFSGLINERLEKGKTQNAGNSDVIDILLATSKENPEEIDRVHIERMCLDLFVAGTDTTSSTLEWAMAEALKNPETVKKAKAELEEVIGKGKVLDEADISRLPYLRCMVKETLRIHPPVPFLIPRRVDQDVEVCGYTVPKNSQVFVNAWAIGRDPDVWKDPLEFKPERFLESELDMRGRDFELIPFGAGRRICPGLPLAVRMVPVMLGSLLNSFDWKLENGIGPKELDMDEKFGITLQKARPLRAVPLPLGGGSGGSTSSGSSGGWRRSSGSGKKVVEPPKLIVPKSVVEPEEIDEGKKKFTIFFGTQTGTAEGFAKALAEEAKARYEKAVIKVIDIDDYAADDEEYEEKFRKETLAFFILATYGDGEPTDNAARFYKWFVEGNDRGDWLKNLQYGVFGLGNRQYEHFNKIAKVVDEKVAEQGGKRIVPLVLGDDDQCIEDDFAAWRENVWPELDNLLRDEDDTTVSTTYTAAIPEYRVVFPDKSDSLISEANGHANGYANGNTVYDAQHPCRSNVAVRKELHTPASDRSCTHLDFDIAGTGLSYGTGDHVGVYCDNLSETVEEAERLLNLPPETYFSLHADKEDGTPLAGSSLPPPFPPCTLRTALTRYADLLNTPKKSALLALAAYASDPNEADRLKYLASPAGKDEYAQSLVANQRSLLEVMAEFPSAKPPLGVFFAAIAPRLQPRFYSISSSPRMAPSRIHVTCALVYEKTPGGRIHKGVCSTWMKNAIPLEESRDCSWAPIFVRQSNFKLPADPKVPVIMIGPGTGLAPFRGFLQERLALKEEGAELGTAVFFFGCRNRKMDYIYEDELNHFLEIGALSELLVAFSREGPTKQYVQHKMAEKASDIWRMISDGAYVYVCGDAKGMARDVHRTLHTIAQEQGSMDSTQAEGFVKNLQMTGRYLRDVW

SEQ ID NO: 642 - protein, 1150 aa, Artificial Sequence
  G8H-CPR engineered fusion
MDYLTIALGFLFALTLYQALISFSRKSKNLPPGPAPLPFIGNLHLLGDQPHKSLAKLAKKHGPIMGLQFGQVTTIVVTSSGMAKEVLQKQDLAFSSRSVPNALHAHDQYKYSVIWLPVASQWRSLRKVLNSNIFSGNRLDANQHLRCRKVQELIAYCRKNCQTGEAVDLGRAAFRTSLNLLSNTIFSKDLTDPYSDSAKEFKDLVWNVMVEAGKPNLVDFFPVLDKVDPQGIRKRMTFHFGKILQLFGGLINERLQQNKAKGAHKDVLDVLLKTSQETPDELNRTHIERMCLDLFVAGTDTTSSTLEWAMAEMLKSPDKMNKAKEELAQVIGKGKAVEEADIASLPYLRCAIKETLRIHPPVPFLIPRRTEQEVEVCGYTVPKNSQVFVNVWAIGRDETTWPDALEFKPERFLESEIDMRGRDFELLPFGAGRRICPGFPLAVRMVPVMLGSLLNSFDWKLEGGIAPKDLDMEEKFGITLQKAHPLRAIPTSLGGGSGGSTSSGSSGGWKKTTADRSGELKPLMIPKSLMAKDEDDDLDLGSGKTRVSIFFGTQTGTAEGFAKALSEEIKARYEKAAVKDDYAADDDQYEEKLKKETLAFFCVATYGDGEPTDNAARFYKWFTEENERDIKLQQLAYGVFALGNRQYEHFNKIGIVLDEELCKKGAKRLIEVGLGDDDQSIEDDFNAWKESLWSELDKLLKDEDDKSVATPYTAVIPEYRVVTHDPRFTTQKSMESNVANGNTTIDIHHPCRVDVAVQKELHTHESDRSCIHLEFDISRTGITYETGDHVGVYAENHVEIVEEAGKLLGHSLDLVFSIHADKEDGSPLESAVPPPFPGPCTLGTGLARYADLLNPPRKSALVALAAYATEPSEAEKLKHLTSPDGKDEYSQWIVASQRSLLEVMAAFPSAKPPLGVFFAAIAPRLQPRYYSISSSPRLAPSRVHVTSALVYGPTPTGRIHKGVCSTWMKNAVPAEKSHECSGAPIFIRASNFKLPSNPSTPIVMVGPGTGLAPFRGFLQERMALKEDGEELGSSLLFFGCRNRQMDFIYEDELNNFVDQGVISELIMAFSREGAQKEYVQHKMMEKAAQVWDLIKEEGYLYVCGDAKGMARDVHRTLHTIVQEQEGVSSSEAEAIVKKLQTEGRYLRDVW

SEQ ID NO: 643 - protein, 1154 aa, Artificial Sequence
  G8H-CPR engineered fusion
MDYLTIALGFLFALTLYQALISFSRKSKNLPPGPAPLPFIGNLHLLGDQPHKSLAKLAKKHGPIMGLQFGQVTTIVVTSSGMAKEVLQKQDLAFSSRSVPNALHAHDQYKYSVIWLPVASQWRSLRKVLNSNIFSGNRLDANQHLRCRKVQELIAYCRKNCQTGEAVDLGRAAFRTSLNLLSNTIFSKDLTDPYSDSAKEFKDLVWNVMVEAGKPNLVDFFPVLDKVDPQGIRKRMTFHFGKILQLFGGLINERLQQNKAKGAHKDVLDVLLKTSQETPDELNRTHIERMCLDLFVAGTDTTSSTLEWAMAEMLKSPDKMNKAKEELAQVIGKGKAVEEADIASLPYLRCAIKETLRIHPPVPFLIPRRTEQEVEVCGYTVPKNSQVFVNVWAIGRDETTWPDALEFKPERFLESEIDMRGRDFELLPFGAGRRICPGFPLAVRMVPVMLGSLLNSFDWKLEGGIAPKDLDMEEKFGITLQKAHPLRAIPTSLGGGSGGSTSSGSSGGWRRSSDRSKESNPVVVPRPLLVEAEEDEVEVGSGKTKLTIFYGTQTGTAEGFAKALAEEIKARYEKAVVKVVDLDDYADDDEQYEEKLKKETLAFFMVATYGDGEPTDNAARFYKWFTDGKERGLWLQQLKFGVFGLGNRQYEHFNKIGKVLDQDLSEQGGKRLIPVGLGDDDQCIEDDFAAWRELLWPELDQLLRDGDDTNTVSTPYTAVIPEYRVVIYDPTTTSFEDKHLSMANGNASYDIHHPCRVNVAVQRELHKPESDRSCIHLEFDISSTGITYETGDHVGVYADNCDETVEEAARLLGQPLDLLFSIHSDDDNGTPLGGSLPPPFPGPCTLRTALARYADLLNPPRKAALIALAAHAIEPSESEKLKFLSSPQGKDDYSQWVVGSQRSLLEVMAEFPSAKPPLGVFFAAVATRLQPRYYSISSSPRFAPSRVHVTCSLVYGPTSTGRIHKGVCSTWMKNAVPLEKSRNCSWAPIFIRASNFKLPSNPSIPIVMVGPGTGLAPFRGFLQERLALKEDGIQLGPALLFFGCRNRRMDFIYEDELNNFVDRGVLSDLIVAFSREGPQKEYVQHKMMEKAAYIWNLISQEGYLYVCGDAKGMARDVHRTLHTIVQEQENADTSKAESVVKKLQMDGRYLRDVW

SEQ ID NO: 644 - protein, 1154 aa, Artificial Sequence
  G8H-CPR engineered fusion
MDYLTIALGFLFALTLYQALISFSRKSKNLPPGPAPLPFIGNLHLLGDQPHKSLAKLAKKHGPIMGLQFGQVTTIVVTSSGMAKEVLQKQDLAFSSRSVPNALHAHDQYKYSVIWLPVASQWRSLRKVLNSNIFSGNRLDANQHLRCRKVQELIAYCRKNCQTGEAVDLGRAAFRTSLNLLSNTIFSKDLTDPYSDSAKEFKDLVWNVMVEAGKPNLVDFFPVLDKVDPQGIRKRMTFHFGKILQLFGGLINERLQQNKAKGAHKDVLDVLLKTSQETPDELNRTHIERMCLDLFVAGTDTTSSTLEWAMAEMLKSPDKMNKAKEELAQVIGKGKAVEEADIASLPYLRCAIKETLRIHPPVPFLIPRRTEQEVEVCGYTVPKNSQVFVNVWAIGRDETTWPDALEFKPERFLESEIDMRGRDFELLPFGAGRRICPGFPLAVRMVPVMLGSLLNSFDWKLEGGIAPKDLDMEEKFGITLQKAHPLRAIPTSLGGGSGGSTSSGSSGGWRKGAGSAKKVVEPPKLVLPKALSETEEVDDGKKKVTIFFGTQTGTAEGFAKALAEEAKARYPQANFKVVDMDDYAAEDEEYEEKLTKETMAFFFLATYGDGEPTDNAARFYKWFAEGKERGDSFKNLHYGVFGLGNRQYEHFNKIAIVVDNILAEQGGKRLVPVGLGDDDQCIEDDFAAWRENVWPELDNLLRNEDDASTVSTPYTAAVLEYRVEFHDQSDELSLENSLANGHANGNASYDAQHPCRANVAVKRELHTPLSDRSCTHLEFDISGTGLQYETGDHVGVYCENLIETVEEAERLLGLSPQTYFSVHTDKEDGTPLGGSALPPPFPPCTLRTALSRYADLLNAPKKSALTALAAYASDPTEADRLKHLASPAGKEEYAQYVVASQRTLLEVMADFPSAKPPLGVFFAGVAPRLQPRFYSISSSPKIAPFRIHVTCALVYDKTPTGRIHKGICSTWIKNAVPLEESSDCSSAPIFVRNSNFKLPSDANIPIIMIGPGTGLAPFRGFLQERLALKESGAELGPAILFFGCRNRKMDFIYEDELNDFVKAGVVSELIVAFSREGSTKEYVQHKMAQRASDVWKMISDGGYIYVCGDAKGMARDVHRTLHTIAQEQGSMSSSEAEGMVKNLQMTGRYLRDVW

SEQ ID NO: 645 - protein, 1154 aa, Artificial Sequence
  G8H-CPR engineered fusion
MDYLTIALGFLFALTLYQALISFSRKSKNLPPGPAPLPFIGNLHLLGDQPHKSLAKLAKKHGPIMGLQFGQVTTIVVTSSGMAKEVLQKQDLAFSSRSVPNALHAHDQYKYSVIWLPVASQWRSLRKVLNSNIFSGNRLDANQHLRCRKVQELIAYCRKNCQTGEAVDLGRAAFRTSLNLLSNTIFSKDLTDPYSDSAKEFKDLVWNVMVEAGKPNLVDFFPVLDKVDPQGIRKRMTFHFGKILQLFGGLINERLQQNKAKGAHKDVLDVLLKTSQETPDELNRTHIERMCLDLFVAGTDTTSSTLEWAMAEMLKSPDKMNKAKEELAQVIGKGKAVEEADIASLPYLRCAIKETLRIHPPVPFLIPRRTEQEVEVCGYTVPKNSQVFVNVWAIGRDETTWPDALEFKPERFLESEIDMRGRDFELLPFGAGRRICPGFPLAVRMVPVMLGSLLNSFDWKLEGGIAPKDLDMEEKFGITLQKAHPLRAIPTSLGGGSGGSTSSGSSGGWRRSSGSGKKVVEPPKLIVPKSVVEPEEIDEGKKKFTIFFGTQTGTAEGFAKALAEEAKARYEKAVIKVIDIDDYAADDEEYEEKFRKETLAFFILATYGDGEPTDNAARFYKWFVEGNDRGDWLKNLQYGVFGLGNRQYEHFNKIAKVVDEKVAEQGGKRIVPLVLGDDDQCIEDDFAAWRENVWPELDNLLRDEDDTTVSTTYTAAIPEYRVVFPDKSDSLISEANGHANGYANGNTVYDAQHPCRSNVAVRKELHTPASDRSCTHLDFDIAGTGLSYGTGDHVGVYCDNLSETVEEAERLLNLPPETYFSLHADKEDGTPLAGSSLPPPFPPCTLRTALTRYADLLNTPKKSALLALAAYASDPNEADRLKYLASPAGKDEYAQSLVANQRSLLEVMAEFPSAKPPLGVFFAAIAPRLQPRFYSISSSPRMAPSRIHVTCALVYEKTPGGRIHKGVCSTWMKNAIPLEESRDCSWAPIFVRQSNFKLPADPKVPVIMIGPGTGLAPFRGFLQERLALKEEGAELGTAVFFFGCRNRKMDYIYEDELNHFLEIGALSELLVAFSREGPTKQYVQHKMAEKASDIWRMISDGAYVYVCGDAKGMARDVHRTLHTIAQEQGSMDSTQAEGFVKNLQMTGRYLRDVW

SEQ ID NO: 646 - protein, 1150 aa, Artificial Sequence
  G8H-CPR engineered fusion
MDYLTITLGLLFALTFYQGLSYLSRRSKKLPPGPAPLPIIGNLHMLGDQPHKSLAKLSKKHGPIMSLKLGQITTVVVSSSGMAKEVLQKHDLAFSSRSIPNALHAHNQYQFSVVWLPVASRWRSLRKTLNSNIFSGNRLDANQHLRSRKVEELIAYCRKNCQTGEAVDVGRAAFRTSLNLLSNLIFSKDLTDPYSDSAKEFKDLVWNIMVEAGKPNLVDYFPVLEKVDPQGIRRRMTVHFGKVLKLFDGLVNERLEQRRSRGGKNDVLDVLLTNSEENPEEIDRTHIERMCLDLFVAGTDTTSSTLEWAMAEMLKNPDKMKKTQAELAEVIGRGKAIEESDLPRLPYLRCVVKETLRIHPPVPFLIPRRVEQDVEVCGYKVPKGSQVLVNAWTIGRDEAVWEDALAFKPERFLESELDIRGRDFELIPFGAGRRICPGLPLALRTVPLMVGSLLNSFNWKLEGGITPKDLDMEEKFGITLQKAHPLRAVPIPFGGGSGGSTSSGSSGGWKKTTADRSGELKPLMIPKSLMAKDEDDDLDLGSGKTRVSIFFGTQTGTAEGFAKALSEEIKARYEKAAVKDDYAADDDQYEEKLKKETLAFFCVATYGDGEPTDNAARFYKWFTEENERDIKLQQLAYGVFALGNRQYEHFNKIGIVLDEELCKKGAKRLIEVGLGDDDQSIEDDFNAWKESLWSELDKLLKDEDDKSVATPYTAVIPEYRVVTHDPRFTTQKSMESNVANGNTTIDIHHPCRVDVAVQKELHTHESDRSCIHLEFDISRTGITYETGDHVGVYAENHVEIVEEAGKLLGHSLDLVFSIHADKEDGSPLESAVPPPFPGPCTLGTGLARYADLLNPPRKSALVALAAYATEPSEAEKLKHLTSPDGKDEYSQWIVASQRSLLEVMAAFPSAKPPLGVFFAAIAPRLQPRYYSISSSPRLAPSRVHVTSALVYGPTPTGRIHKGVCSTWMKNAVPAEKSHECSGAPIFIRASNFKLPSNPSTPIVMVGPGTGLAPFRGFLQERMALKEDGEELGSSLLFFGCRNRQMDFIYEDELNNFVDQGVISELIMAFSREGAQKEYVQHKMMEKAAQVWDLIKEEGYLYVCGDAKGMARDVHRTLHTIVQEQEGVSSSEAEAIVKKLQTEGRYLRDVW

SEQ ID NO: 647 - protein, 1154 aa, Artificial Sequence
  G8H-CPR engineered fusion
MDYLTITLGLLFALTFYQGLSYLSRRSKKLPPGPAPLPIIGNLHMLGDQPHKSLAKLSKKHGPIMSLKLGQITTVVVSSSGMAKEVLQKHDLAFSSRSIPNALHAHNQYQFSVVWLPVASRWRSLRKTLNSNIFSGNRLDANQHLRSRKVEELIAYCRKNCQTGEAVDVGRAAFRTSLNLLSNLIFSKDLTDPYSDSAKEFKDLVWNIMVEAGKPNLVDYFPVLEKVDPQGIRRRMTVHFGKVLKLFDGLVNERLEQRRSRGGKNDVLDVLLTNSEENPEEIDRTHIERMCLDLFVAGTDTTSSTLEWAMAEMLKNPDKMKKTQAELAEVIGRGKAIEESDLPRLPYLRCVVKETLRIHPPVPFLIPRRVEQDVEVCGYKVPKGSQVLVNAWTIGRDEAVWEDALAFKPERFLESELDIRGRDFELIPFGAGRRICPGLPLALRTVPLMVGSLLNSFNWKLEGGITPKDLDMEEKFGITLQKAHPLRAVPIPFGGGSGGSTSSGSSGGWRRSSDRSKESNPVVVPRPLLVEAEEDEVEVGSGKTKLTIFYGTQTGTAEGFAKALAEEIKARYEKAVVKVVDLDDYADDDEQYEEKLKKETLAFFMVATYGDGEPTDNAARFYKWFTDGKERGLWLQQLKFGVFGLGNRQYEHFNKIGKVLDQDLSEQGGKRLIPVGLGDDDQCIEDDFAAWRELLWPELDQLLRDGDDTNTVSTPYTAVIPEYRVVIYDPTTTSFEDKHLSMANGNASYDIHHPCRVNVAVQRELHKPESDRSCIHLEFDISSTGITYETGDHVGVYADNCDETVEEAARLLGQPLDLLFSIHSDDDNGTPLGGSLPPPFPGPCTLRTALARYADLLNPPRKAALIALAAHAIEPSESEKLKFLSSPQGKDDYSQWVVGSQRSLLEVMAEFPSAKPPLGVFFAAVATRLQPRYYSISSSPRFAPSRVHVTCSLVYGPTSTGRIHKGVCSTWMKNAVPLEKSRNCSWAPIFIRASNFKLPSNPSIPIVMVGPGTGLAPFRGFLQERLALKEDGIQLGPALLFFGCRNRRMDFIYEDELNNFVDRGVLSDLIVAFSREGPQKEYVQHKMMEKAAYIWNLISQEGYLYVCGDAKGMARDVHRTLHTIVQEQENADTSKAESVVKKLQMDGRYLRDVW

SEQ ID NO: 648 - protein, 1154 aa, Artificial Sequence
  G8H-CPR engineered fusion
MDYLTITLGLLFALTFYQGLSYLSRRSKKLPPGPAPLPIIGNLHMLGDQPHKSLAKLSKKHGPIMSLKLGQITTVVVSSSGMAKEVLQKHDLAFSSRSIPNALHAHNQYQFSVVWLPVASRWRSLRKTLNSNIFSGNRLDANQHLRSRKVEELIAYCRKNCQTGEAVDVGRAAFRTSLNLLSNLIFSKDLTDPYSDSAKEFKDLVWNIMVEAGKPNLVDYFPVLEKVDPQGIRRRMTVHFGKVLKLFDGLVNERLEQRRSRGGKNDVLDVLLTNSEENPEEIDRTHIERMCLDLFVAGTDTTSSTLEWAMAEMLKNPDKMKKTQAELAEVIGRGKAIEESDLPRLPYLRCVVKETLRIHPPVPFLIPRRVEQDVEVCGYKVPKGSQVLVNAWTIGRDEAVWEDALAFKPERFLESELDIRGRDFELIPFGAGRRICPGLPLALRTVPLMVGSLLNSFNWKLEGGITPKDLDMEEKFGITLQKAHPLRAVPIPFGGGSGGSTSSGSSGGWRKGAGSAKKVVEPPKLVLPKALSETEEVDDGKKKVTIFFGTQTGTAEGFAKALAEEAKARYPQANFKVVDMDDYAAEDEEYEEKLTKETMAFFFLATYGDGEPTDNAARFYKWFAEGKERGDSFKNLHYGVFGLGNRQYEHFNKIAIVVDNILAEQGGKRLVPVGLGDDDQCIEDDFAAWRENVWPELDNLLRNEDDASTVSTPYTAAVLEYRVEFHDQSDELSLENSLANGHANGNASYDAQHPCRANVAVKRELHTPLSDRSCTHLEFDISGTGLQYETGDHVGVYCENLIETVEEAERLLGLSPQTYFSVHTDKEDGTPLGGSALPPPFPPCTLRTALSRYADLLNAPKKSALTALAAYASDPTEADRLKHLASPAGKEEYAQYVVASQRTLLEVMADFPSAKPPLGVFFAGVAPRLQPRFYSISSSPKIAPFRIHVTCALVYDKTPTGRIHKGICSTWIKNAVPLEESSDCSSAPIFVRNSNFKLPSDANIPIIMIGPGTGLAPFRGFLQERLALKESGAELGPAILFFGCRNRKMDFIYEDELNDFVKAGVVSELIVAFSREGSTKEYVQHKMAQRASDVWKMISDGGYIYVCGDAKGMARDVHRTLHTIAQEQGSMSSSEAEGMVKNLQMTGRYLRDVW

SEQ ID NO: 649 - protein, 1154 aa, Artificial Sequence
  G8H-CPR engineered fusion
MDYLTITLGLLFALTFYQGLSYLSRRSKKLPPGPAPLPIIGNLHMLGDQPHKSLAKLSKKHGPIMSLKLGQITTVVVSSSGMAKEVLQKHDLAFSSRSIPNALHAHNQYQFSVVWLPVASRWRSLRKTLNSNIFSGNRLDANQHLRSRKVEELIAYCRKNCQTGEAVDVGRAAFRTSLNLLSNLIFSKDLTDPYSDSAKEFKDLVWNIMVEAGKPNLVDYFPVLEKVDPQGIRRRMTVHFGKVLKLFDGLVNERLEQRRSRGGKNDVLDVLLTNSEENPEEIDRTHIERMCLDLFVAGTDTTSSTLEWAMAEMLKNPDKMKKTQAELAEVIGRGKAIEESDLPRLPYLRCVVKETLRIHPPVPFLIPRRVEQDVEVCGYKVPKGSQVLVNAWTIGRDEAVWEDALAFKPERFLESELDIRGRDFELIPFGAGRRICPGLPLALRTVPLMVGSLLNSFNWKLEGGITPKDLDMEEKFGITLQKAHPLRAVPIPFGGGSGGSTSSGSSGGWRRSSGSGKKVVEPPKLIVPKSVVEPEEIDEGKKKFTIFFGTQTGTAEGFAKALAEEAKARYEKAVIKVIDIDDYAADDEEYEEKFRKETLAFFILATYGDGEPTDNAARFYKWFVEGNDRGDWLKNLQYGVFGLGNRQYEHFNKIAKVVDEKVAEQGGKRIVPLVLGDDDQCIEDDFAAWRENVWPELDNLLRDEDDTTVSTTYTAAIPEYRVVFPDKSDSLISEANGHANGYANGNTVYDAQHPCRSNVAVRKELHTPASDRSCTHLDFDIAGTGLSYGTGDHVGVYCDNLSETVEEAERLLNLPPETYFSLHADKEDGTPLAGSSLPPPFPPCTLRTALTRYADLLNTPKKSALLALAAYASDPNEADRLKYLASPAGKDEYAQSLVANQRSLLEVMAEFPSAKPPLGVFFAAIAPRLQPRFYSISSSPRMAPSRIHVTCALVYEKTPGGRIHKGVCSTWMKNAIPLEESRDCSWAPIFVRQSNFKLPADPKVPVIMIGPGTGLAPFRGFLQERLALKEEGAELGTAVFFFGCRNRKMDYIYEDELNHFLEIGALSELLVAFSREGPTKQYVQHKMAEKASDIWRMISDGAYVYVCGDAKGMARDVHRTLHTIAQEQGSMDSTQAEGFVKNLQMTGRYLRDVW

SEQ ID NO: 650 - protein, 1150 aa, Artificial Sequence
  G8H-CPR engineered fusion
MDYLTLVLGLLFALTFYQGLSYLSRKSKKLPPGPAPLPFIGNLHLLGDQPHKSLAKLSKKHGPLMSLKLGHITTVVISSSGMAKEVLQKQDLAFSSRSVPDALHAHNQFQFSVVWLPVASRWRSLRKILNSNIFSGNRLDANQHLRCRKVQELIAYCRKNCQTGEAVDVGRAAFRTSLNLLSNTIFSKDLTDPYSDSAKEFKDLVWNIMVEAGKPNLVDFFPVLEKVDPQGIRKRMTVHFGKVLKLFNGLINERLEQKRLQSGNNDVLDVLLTTSEESPEEIDRTHIERMCLDLFVAGTDTTSSTLEWAMAEMLKNPDKMQKTQAEIAEVIGKGKAIEEADVARLPYLRCVVKETLRIHPPVPFLIPRKVDQDVEVCGYKVPKGSQVLVNAWAIGRDGTVWEDPLAFKPERFFESEIDIRGRDFEVIPFGAGRRICPGLPLAARMVPVMLGSLLNSFNWKLEGGIAPKDLDMDEKFGITLQKAHPLRAVPSPLGGGSGGSTSSGSSGGWKKTTADRSGELKPLMIPKSLMAKDEDDDLDLGSGKTRVSIFFGTQTGTAEGFAKALSEEIKARYEKAAVKDDYAADDDQYEEKLKKETLAFFCVATYGDGEPTDNAARFYKWFTEENERDIKLQQLAYGVFALGNRQYEHFNKIGIVLDEELCKKGAKRLIEVGLGDDDQSIEDDFNAWKESLWSELDKLLKDEDDKSVATPYTAVIPEYRVVTHDPRFTTQKSMESNVANGNTTIDIHHPCRVDVAVQKELHTHESDRSCIHLEFDISRTGITYETGDHVGVYAENHVEIVEEAGKLLGHSLDLVFSIHADKEDGSPLESAVPPPFPGPCTLGTGLARYADLLNPPRKSALVALAAYATEPSEAEKLKHLTSPDGKDEYSQWIVASQRSLLEVMAAFPSAKPPLGVFFAAIAPRLQPRYYSISSSPRLAPSRVHVTSALVYGPTPTGRIHKGVCSTWMKNAVPAEKSHECSGAPIFIRASNFKLPSNPSTPIVMVGPGTGLAPFRGFLQERMALKEDGEELGSSLLFFGCRNRQMDFIYEDELNNFVDQGVISELIMAFSREGAQKEYVQHKMMEKAAQVWDLIKEEGYLYVCGDAKGMARDVHRTLHTIVQEQEGVSSSEAEAIVKKLQTEGRYLRDVW

SEQ ID NO: 651 - protein, 1154 aa, Artificial Sequence
  G8H-CPR engineered fusion
MDYLTLVLGLLFALTFYQGLSYLSRKSKKLPPGPAPLPFIGNLHLLGDQPHKSLAKLSKKHGPLMSLKLGHITTVVISSSGMAKEVLQKQDLAFSSRSVPDALHAHNQFQFSVVWLPVASRWRSLRKILNSNIFSGNRLDANQHLRCRKVQELIAYCRKNCQTGEAVDVGRAAFRTSLNLLSNTIFSKDLTDPYSDSAKEFKDLVWNIMVEAGKPNLVDFFPVLEKVDPQGIRKRMTVHFGKVLKLFNGLINERLEQKRLQSGNNDVLDVLLTTSEESPEEIDRTHIERMCLDLFVAGTDTTSSTLEWAMAEMLKNPDKMQKTQAEIAEVIGKGKAIEEADVARLPYLRCVVKETLRIHPPVPFLIPRKVDQDVEVCGYKVPKGSQVLVNAWAIGRDGTVWEDPLAFKPERFFESEIDIRGRDFEVIPFGAGRRICPGLPLAARMVPVMLGSLLNSFNWKLEGGIAPKDLDMDEKFGITLQKAHPLRAVPSPLGGGSGGSTSSGSSGGWRRSSDRSKESNPVVVPRPLLVEAEEDEVEVGSGKTKLTIFYGTQTGTAEGFAKALAEEIKARYEKAVVKVVDLDDYADDDEQYEEKLKKETLAFFMVATYGDGEPTDNAARFYKWFTDGKERGLWLQQLKFGVFGLGNRQYEHFNKIGKVLDQDLSEQGGKRLIPVGLGDDDQCIEDDFAAWRELLWPELDQLLRDGDDTNTVSTPYTAVIPEYRVVIYDPTTTSFEDKHLSMANGNASYDIHHPCRVNVAVQRELHKPESDRSCIHLEFDISSTGITYETGDHVGVYADNCDETVEEAARLLGQPLDLLFSIHSDDDNGTPLGGSLPPPFPGPCTLRTALARYADLLNPPRKAALIALAAHAIEPSESEKLKFLSSPQGKDDYSQWVVGSQRSLLEVMAEFPSAKPPLGVFFAAVATRLQPRYYSISSSPRFAPSRVHVTCSLVYGPTSTGRIHKGVCSTWMKNAVPLEKSRNCSWAPIFIRASNFKLPSNPSIPIVMVGPGTGLAPFRGFLQERLALKEDGIQLGPALLFFGCRNRRMDFIYEDELNNFVDRGVLSDLIVAFSREGPQKEYVQHKMMEKAAYIWNLISQEGYLYVCGDAKGMARDVHRTLHTIVQEQENADTSKAESVVKKLQMDGRYLRDVW

SEQ ID NO: 652 - protein, 1154 aa, Artificial Sequence
  G8H-CPR engineered fusion
MDYLTLVLGLLFALTFYQGLSYLSRKSKKLPPGPAPLPFIGNLHLLGDQPHKSLAKLSKKHGPLMSLKLGHITTVVISSSGMAKEVLQKQDLAFSSRSVPDALHAHNQFQFSVVWLPVASRWRSLRKILNSNIFSGNRLDANQHLRCRKVQELIAYCRKNCQTGEAVDVGRAAFRTSLNLLSNTIFSKDLTDPYSDSAKEFKDLVWNIMVEAGKPNLVDFFPVLEKVDPQGIRKRMTVHFGKVLKLFNGLINERLEQKRLQSGNNDVLDVLLTTSEESPEEIDRTHIERMCLDLFVAGTDTTSSTLEWAMAEMLKNPDKMQKTQAEIAEVIGKGKAIEEADVARLPYLRCVVKETLRIHPPVPFLIPRKVDQDVEVCGYKVPKGSQVLVNAWAIGRDGTVWEDPLAFKPERFFESEIDIRGRDFEVIPFGAGRRICPGLPLAARMVPVMLGSLLNSFNWKLEGGIAPKDLDMDEKFGITLQKAHPLRAVPSPLGGGSGGSTSSGSSGGWRKGAGSAKKVVEPPKLVLPKALSETEEVDDGKKKVTIFFGTQTGTAEGFAKALAEEAKARYPQANFKVVDMDDYAAEDEEYEEKLTKETMAFFFLATYGDGEPTDNAARFYKWFAEGKERGDSFKNLHYGVFGLGNRQYEHFNKIAIVVDNILAEQGGKRLVPVGLGDDDQCIEDDFAAWRENVWPELDNLLRNEDDASTVSTPYTAAVLEYRVEFHDQSDELSLENSLANGHANGNASYDAQHPCRANVAVKRELHTPLSDRSCTHLEFDISGTGLQYETGDHVGVYCENLIETVEEAERLLGLSPQTYFSVHTDKEDGTPLGGSALPPPFPPCTLRTALSRYADLLNAPKKSALTALAAYASDPTEADRLKHLASPAGKEEYAQYVVASQRTLLEVMADFPSAKPPLGVFFAGVAPRLQPRFYSISSSPKIAPFRIHVTCALVYDKTPTGRIHKGICSTWIKNAVPLEESSDCSSAPIFVRNSNFKLPSDANIPIIMIGPGTGLAPFRGFLQERLALKESGAELGPAILFFGCRNRKMDFIYEDELNDFVKAGVVSELIVAFSREGSTKEYVQHKMAQRASDVWKMISDGGYIYVCGDAKGMARDVHRTLHTIAQEQGSMSSSEAEGMVKNLQMTGRYLRDVW

SEQ ID NO: 653 - protein, 1154 aa, Artificial Sequence
  G8H-CPR engineered fusion
MDYLTLVLGLLFALTFYQGLSYLSRKSKKLPPGPAPLPFIGNLHLLGDQPHKSLAKLSKKHGPLMSLKLGHITTVVISSSGMAKEVLQKQDLAFSSRSVPDALHAHNQFQFSVVWLPVASRWRSLRKILNSNIFSGNRLDANQHLRCRKVQELIAYCRKNCQTGEAVDVGRAAFRTSLNLLSNTIFSKDLTDPYSDSAKEFKDLVWNIMVEAGKPNLVDFFPVLEKVDPQGIRKRMTVHFGKVLKLFNGLINERLEQKRLQSGNNDVLDVLLTTSEESPEEIDRTHIERMCLDLFVAGTDTTSSTLEWAMAEMLKNPDKMQKTQAEIAEVIGKGKAIEEADVARLPYLRCVVKETLRIHPPVPFLIPRKVDQDVEVCGYKVPKGSQVLVNAWAIGRDGTVWEDPLAFKPERFFESEIDIRGRDFEVIPFGAGRRICPGLPLAARMVPVMLGSLLNSFNWKLEGGIAPKDLDMDEKFGITLQKAHPLRAVPSPLGGGSGGSTSSGSSGGWRRSSGSGKKVVEPPKLIVPKSVVEPEEIDEGKKKFTIFFGTQTGTAEGFAKALAEEAKARYEKAVIKVIDIDDYAADDEEYEEKFRKETLAFFILATYGDGEPTDNAARFYKWFVEGNDRGDWLKNLQYGVFGLGNRQYEHFNKIAKVVDEKVAEQGGKRIVPLVLGDDDQCIEDDFAAWRENVWPELDNLLRDEDDTTVSTTYTAAIPEYRVVFPDKSDSLISEANGHANGYANGNTVYDAQHPCRSNVAVRKELHTPASDRSCTHLDFDIAGTGLSYGTGDHVGVYCDNLSETVEEAERLLNLPPETYFSLHADKEDGTPLAGSSLPPPFPPCTLRTALTRYADLLNTPKKSALLALAAYASDPNEADRLKYLASPAGKDEYAQSLVANQRSLLEVMAEFPSAKPPLGVFFAAIAPRLQPRFYSISSSPRMAPSRIHVTCALVYEKTPGGRIHKGVCSTWMKNAIPLEESRDCSWAPIFVRQSNFKLPADPKVPVIMIGPGTGLAPFRGFLQERLALKEEGAELGTAVFFFGCRNRKMDYIYEDELNHFLEIGALSELLVAFSREGPTKQYVQHKMAEKASDIWRMISDGAYVYVCGDAKGMARDVHRTLHTIAQEQGSMDSTQAEGFVKNLQMTGRYLRDVW

SEQ ID NO: 654 - protein, 1150 aa, Artificial Sequence; identical to SEQ ID NO: 626
  G8H-CPR engineered fusion

SEQ ID NO: 655 - protein, 1154 aa, Artificial Sequence
  G8H-CPR engineered fusion
MDYLTIILTLLFALTLYEAFSYLSRRTKNLPPGPSPLPFIGSLHLLGDQPHKSLAKLSKKHGPIMSLKLGQITTIVISSSTMAKEVLQKQDLAFSSRSVPNALHAHNQFKFSVVWLPVASRWRSLRKVLNSNIFSGNRLDANQHLRTRKVQELIAYCRKNSQSGEAVDVGRAAFRTSLNLLSNLIFSKDLTDPYSDSAKEFKDLVWNIMVEAGKPNLVDFFPLLEKVDPQGIRHRMTIHFGEVLKLFGGLVNERLEQRRSKGEKNDVLDVLLTTSQESPEEIDRTHIERMCLDLFVAGTDTTSSTLEWAMSEMLKNPDKMKKTQDELAQVIGRGKTIEESDINRLPYLRCVMKETLRIHPPVPFLIPRKVEQSVEVCGYNVPKGSQVLVNAWAIGRDETVWDDALAFKPERFMESELDIRGRDFELIPFGAGRRICPGLPLALRTVPLMLGSLLNSFNWKLEGGMAPKDLDMEEKFGITLQKAHPLRAVPSTLGGGSGGSTSSGSSGGWRRSSDRSKESNPVVVPRPLLVEAEEDEVEVGSGKTKLTIFYGTQTGTAEGFAKALAEEIKARYEKAVVKVVDLDDYADDDEQYEEKLKKETLAFFMVATYGDGEPTDNAARFYKWFTDGKERGLWLQQLKFGVFGLGNRQYEHFNKIGKVLDQDLSEQGGKRLIPVGLGDDDQCIEDDFAAWRELLWPELDQLLRDGDDTNTVSTPYTAVIPEYRVVIYDPTTTSFEDKHLSMANGNASYDIHHPCRVNVAVQRELHKPESDRSCIHLEFDISSTGITYETGDHVGVYADNCDETVEEAARLLGQPLDLLFSIHSDDDNGTPLGGSLPPPFPGPCTLRTALARYADLLNPPRKAALIALAAHAIEPSESEKLKFLSSPQGKDDYSQWVVGSQRSLLEVMAEFPSAKPPLGVFFAAVATRLQPRYYSISSSPRFAPSRVHVTCSLVYGPTSTGRIHKGVCSTWMKNAVPLEKSRNCSWAPIFIRASNFKLPSNPSIPIVMVGPGTGLAPFRGFLQERLALKEDGIQLGPALLFFGCRNRRMDFIYEDELNNFVDRGVLSDLIVAFSREGPQKEYVQHKMMEKAAYIWNLISQEGYLYVCGDAKGMARDVHRTLHTIVQEQENADTSKAESVVKKLQMDGRYLRDVW

SEQ ID NO: 656 - protein, 1154 aa, Artificial Sequence
  G8H-CPR engineered fusion
MDYLTIILTLLFALTLYEAFSYLSRRTKNLPPGPSPLPFIGSLHLLGDQPHKSLAKLSKKHGPIMSLKLGQITTIVISSSTMAKEVLQKQDLAFSSRSVPNALHAHNQFKFSVVWLPVASRWRSLRKVLNSNIFSGNRLDANQHLRTRKVQELIAYCRKNSQSGEAVDVGRAAFRTSLNLLSNLIFSKDLTDPYSDSAKEFKDLVWNIMVEAGKPNLVDFFPLLEKVDPQGIRHRMTIHFGEVLKLFGGLVNERLEQRRSKGEKNDVLDVLLTTSQESPEEIDRTHIERMCLDLFVAGTDTTSSTLEWAMSEMLKNPDKMKKTQDELAQVIGRGKTIEESDINRLPYLRCVMKETLRIHPPVPFLIPRKVEQSVEVCGYNVPKGSQVLVNAWAIGRDETVWDDALAFKPERFMESELDIRGRDFELIPFGAGRRICPGLPLALRTVPLMLGSLLNSFNWKLEGGMAPKDLDMEEKFGITLQKAHPLRAVPSTLGGGSGGSTSSGSSGGWRKGAGSAKKVVEPPKLVLPKALSETEEVDDGKKKVTIFFGTQTGTAEGFAKALAEEAKARYPQANFKVVDMDDYAAEDEEYEEKLTKETMAFFFLATYGDGEPTDNAARFYKWFAEGKERGDSFKNLHYGVFGLGNRQYEHFNKIAIVVDNILAEQGGKRLVPVGLGDDDQCIEDDFAAWRENVWPELDNLLRNEDDASTVSTPYTAAVLEYRVEFHDQSDELSLENSLANGHANGNASYDAQHPCRANVAVKRELHTPLSDRSCTHLEFDISGTGLQYETGDHVGVYCENLIETVEEAERLLGLSPQTYFSVHTDKEDGTPLGGSALPPPFPPCTLRTALSRYADLLNAPKKSALTALAAYASDPTEADRLKHLASPAGKEEYAQYVVASQRTLLEVMADFPSAKPPLGVFFAGVAPRLQPRFYSISSSPKIAPFRIHVTCALVYDKTPTGRIHKGICSTWIKNAVPLEESSDCSSAPIFVRNSNFKLPSDANIPIIMIGPGTGLAPFRGFLQERLALKESGAELGPAILFFGCRNRKMDFIYEDELNDFVKAGVVSELIVAFSREGSTKEYVQHKMAQRASDVWKMISDGGYIYVCGDAKGMARDVHRTLHTIAQEQGSMSSSEAEGMVKNLQMTGRYLRDVW

SEQ ID NO: 657 - protein, 1154 aa, Artificial Sequence; identical to SEQ ID NO: 627
  G8H-CPR engineered fusion

SEQ ID NO: 658 - protein, 1149 aa, Artificial Sequence; identical to SEQ ID NO: 632
  G8H-CPR engineered fusion

SEQ ID NO: 659 - protein, 1153 aa, Artificial Sequence
  G8H-CPR engineered fusion
MDFLTIFIGPLLAIIALFYARLTISTRGKNLPPGPTPLPFIGNLHLLGHHPHKSLARLAKTYGPLMLLRLGSENTVVVSSAAVAKEVLQKHDLAFSSRSIPDAVHAHDQFKYSVVWLPVASRWRSLRKTMNSNIFSGSCLDANQHLRSRKVEELIAYCKESCRRAEAVDVGRAAFRTALNSLSNTIFSRDLADPLSDSGKEFKDVVSSIMMEAGKPNSVDYYPFLSRFDPQGIRRRTAIYFDKLINIFKGLIDERLEKRRSQYEEATDVIDILLNTIEQNPEEIDRTHIERMFLDLFLAGTDTTSSTVEWAMAEAMKNPETMKKAKAELAQVIGKGKIVQETDIPHLPYLQCIVKETLRLHPPVPFLIPRRVHEDVDILGYVVPNNSQVFVNMWAIGRDPDMWKNPLQFDPDRFHDSEVGLRGKDFELIPFGAGRRICPGLPLAMRMVPVVLGSLLNSFDWKVEGGKELEMNEKFGITLEKAQPLMAVPIALGGGSGGSTSSGSSGGWRRSSDRSKESNPVVVPRPLLVEAEEDEVEVGSGKTKLTIFYGTQTGTAEGFAKALAEEIKARYEKAVVKVVDLDDYADDDEQYEEKLKKETLAFFMVATYGDGEPTDNAARFYKWFTDGKERGLWLQQLKFGVFGLGNRQYEHFNKIGKVLDQDLSEQGGKRLIPVGLGDDDQCIEDDFAAWRELLWPELDQLLRDGDDTNTVSTPYTAVIPEYRVVIYDPTTTSFEDKHLSMANGNASYDIHHPCRVNVAVQRELHKPESDRSCIHLEFDISSTGITYETGDHVGVYADNCDETVEEAARLLGQPLDLLFSIHSDDDNGTPLGGSLPPPFPGPCTLRTALARYADLLNPPRKAALIALAAHAIEPSESEKLKFLSSPQGKDDYSQWVVGSQRSLLEVMAEFPSAKPPLGVFFAAVATRLQPRYYSISSSPRFAPSRVHVTCSLVYGPTSTGRIHKGVCSTWMKNAVPLEKSRNCSWAPIFIRASNFKLPSNPSIPIVMVGPGTGLAPFRGFLQERLALKEDGIQLGPALLFFGCRNRRMDFIYEDELNNFVDRGVLSDLIVAFSREGPQKEYVQHKMMEKAAYIWNLISQEGYLYVCGDAKGMARDVHRTLHTIVQEQENADTSKAESVVKKLQMDGRYLRDVW

SEQ ID NO: 660 - protein, 1153 aa, Artificial Sequence
  G8H-CPR engineered fusion
MDFLTIFIGPLLAIIALFYARLTISTRGKNLPPGPTPLPFIGNLHLLGHHPHKSLARLAKTYGPLMLLRLGSENTVVVSSAAVAKEVLQKHDLAFSSRSIPDAVHAHDQFKYSVVWLPVASRWRSLRKTMNSNIFSGSCLDANQHLRSRKVEELIAYCKESCRRAEAVDVGRAAFRTALNSLSNTIFSRDLADPLSDSGKEFKDVVSSIMMEAGKPNSVDYYPFLSRFDPQGIRRRTAIYFDKLINIFKGLIDERLEKRRSQYEEATDVIDILLNTIEQNPEEIDRTHIERMFLDLFLAGTDTTSSTVEWAMAEAMKNPETMKKAKAELAQVIGKGKIVQETDIPHLPYLQCIVKETLRLHPPVPFLIPRRVHEDVDILGYVVPNNSQVFVNMWAIGRDPDMWKNPLQFDPDRFHDSEVGLRGKDFELIPFGAGRRICPGLPLAMRMVPVVLGSLLNSFDWKVEGGKELEMNEKFGITLEKAQPLMAVPIALGGGSGGSTSSGSSGGWRKGAGSAKKVVEPPKLVLPKALSETEEVDDGKKKVTIFFGTQTGTAEGFAKALAEEAKARYPQANFKVVDMDDYAAEDEEYEEKLTKETMAFFFLATYGDGEPTDNAARFYKWFAEGKERGDSFKNLHYGVFGLGNRQYEHFNKIAIVVDNILAEQGGKRLVPVGLGDDDQCIEDDFAAWRENVWPELDNLLRNEDDASTVSTPYTAAVLEYRVEFHDQSDELSLENSLANGHANGNASYDAQHPCRANVAVKRELHTPLSDRSCTHLEFDISGTGLQYETGDHVGVYCENLIETVEEAERLLGLSPQTYFSVHTDKEDGTPLGGSALPPPFPPCTLRTALSRYADLLNAPKKSALTALAAYASDPTEADRLKHLASPAGKEEYAQYVVASQRTLLEVMADFPSAKPPLGVFFAGVAPRLQPRFYSISSSPKIAPFRIHVTCALVYDKTPTGRIHKGICSTWIKNAVPLEESSDCSSAPIFVRNSNFKLPSDANIPIIMIGPGTGLAPFRGFLQERLALKESGAELGPAILFFGCRNRKMDFIYEDELNDFVKAGVVSELIVAFSREGSTKEYVQHKMAQRASDVWKMISDGGYIYVCGDAKGMARDVHRTLHTIAQEQGSMSSSEAEGMVKNLQMTGRYLRDVW

SEQ ID NO: 661 - protein, 1153 aa, Artificial Sequence; identical to SEQ ID NO: 633
  G8H-CPR engineered fusion

SEQ ID NO: 662 - protein, 1155 aa, Artificial Sequence
  G8H-CPR engineered fusion
MDFFSFLLYFLFTLSLVQATISLVRGSKHKGRKLPPGPAPLPIVGNLLKLGDQPHKSLADLAKIHGPIMTLKLGHITTVIISSSDLAKEVLQKQDLAFSSRSIPDAIRAHNQFQYSVVWLPVANQWRSLRKILNSNIFSGNRLDANQHLRWRKVQELIAYVRKSSQVGDAVDIGRAAFRTSLNLLSNTIFSVDLADPNNDSAKEFKDLVSNIMVEAGKPNLVDYFPVLEKIDPQGIRRRMTIHFGKVLEMFGRLINERLEFRRLRSSVISNDVLDVLLNTEESGNEIDRNHIERMCLDLFVAGTDTTSSTLEWAMAEVLHNPETLVKAKAELEQIIGRGKAIEESDISNLPYLRSIIKETLRLHPPVPFLIPRKVEVDSEVSGYTVPKGSQVLVNAWAIGRDPCCWENPLNFSPERFLNSELDVRGRDFELIPFGAGRRICPGLPLAIRMVPVMLGSLLNSFDWKLDGGIKPEELDMEEKFGITLQKAQPLRAVPTLVGGGSGGSTSSGSSGGWKKTTADRSGELKPLMIPKSLMAKDEDDDLDLGSGKTRVSIFFGTQTGTAEGFAKALSEEIKARYEKAAVKDDYAADDDQYEEKLKKETLAFFCVATYGDGEPTDNAARFYKWFTEENERDIKLQQLAYGVFALGNRQYEHFNKIGIVLDEELCKKGAKRLIEVGLGDDDQSIEDDFNAWKESLWSELDKLLKDEDDKSVATPYTAVIPEYRVVTHDPRFTTQKSMESNVANGNTTIDIHHPCRVDVAVQKELHTHESDRSCIHLEFDISRTGITYETGDHVGVYAENHVEIVEEAGKLLGHSLDLVFSIHADKEDGSPLESAVPPPFPGPCTLGTGLARYADLLNPPRKSALVALAAYATEPSEAEKLKHLTSPDGKDEYSQWIVASQRSLLEVMAAFPSAKPPLGVFFAAIAPRLQPRYYSISSSPRLAPSRVHVTSALVYGPTPTGRIHKGVCSTWMKNAVPAEKSHECSGAPIFIRASNFKLPSNPSTPIVMVGPGTGLAPFRGFLQERMALKEDGEELGSSLLFFGCRNRQMDFIYEDELNNFVDQGVISELIMAFSREGAQKEYVQHKMMEKAAQVWDLIKEEGYLYVCGDAKGMARDVHRTLHTIVQEQEGVSSSEAEAIVKKLQTEGRYLRDVW

SEQ ID NO: 663 - protein, 1159 aa, Artificial Sequence
  G8H-CPR engineered fusion
MDFFSFLLYFLFTLSLVQATISLVRGSKHKGRKLPPGPAPLPIVGNLLKLGDQPHKSLADLAKIHGPIMTLKLGHITTVIISSSDLAKEVLQKQDLAFSSRSIPDAIRAHNQFQYSVVWLPVANQWRSLRKILNSNIFSGNRLDANQHLRWRKVQELIAYVRKSSQVGDAVDIGRAAFRTSLNLLSNTIFSVDLADPNNDSAKEFKDLVSNIMVEAGKPNLVDYFPVLEKIDPQGIRRRMTIHFGKVLEMFGRLINERLEFRRLRSSVISNDVLDVLLNTEESGNEIDRNHIERMCLDLFVAGTDTTSSTLEWAMAEVLHNPETLVKAKAELEQIIGRGKAIEESDISNLPYLRSIIKETLRLHPPVPFLIPRKVEVDSEVSGYTVPKGSQVLVNAWAIGRDPCCWENPLNFSPERFLNSELDVRGRDFELIPFGAGRRICPGLPLAIRMVPVMLGSLLNSFDWKLDGGIKPEELDMEEKFGITLQKAQPLRAVPTLVGGGSGGSTSSGSSGGWRRSSDRSKESNPVVVPRPLLVEAEEDEVEVGSGKTKLTIFYGTQTGTAEGFAKALAEEIKARYEKAVVKVVDLDDYADDDEQYEEKLKKETLAFFMVATYGDGEPTDNAARFYKWFTDGKERGLWLQQLKFGVFGLGNRQYEHFNKIGKVLDQDLSEQGGKRLIPVGLGDDDQCIEDDFAAWRELLWPELDQLLRDGDDTNTVSTPYTAVIPEYRVVIYDPTTTSFEDKHLSMANGNASYDIHHPCRVNVAVQRELHKPESDRSCIHLEFDISSTGITYETGDHVGVYADNCDETVEEAARLLGQPLDLLFSIHSDDDNGTPLGGSLPPPFPGPCTLRTALARYADLLNPPRKAALIALAAHAIEPSESEKLKFLSSPQGKDDYSQWVVGSQRSLLEVMAEFPSAKPPLGVFFAAVATRLQPRYYSISSSPRFAPSRVHVTCSLVYGPTSTGRIHKGVCSTWMKNAVPLEKSRNCSWAPIFIRASNFKLPSNPSIPIVMVGPGTGLAPFRGFLQERLALKEDGIQLGPALLFFGCRNRRMDFIYEDELNNFVDRGVLSDLIVAFSREGPQKEYVQHKMMEKAAYIWNLISQEGYLYVCGDAKGMARDVHRTLHTIVQEQENADTSKAESVVKKLQMDGRYLRDVW

SEQ ID NO: 664 - protein, 1159 aa, Artificial Sequence
  G8H-CPR engineered fusion
MDFFSFLLYFLFTLSLVQATISLVRGSKHKGRKLPPGPAPLPIVGNLLKLGDQPHKSLADLAKIHGPIMTLKLGHITTVIISSSDLAKEVLQKQDLAFSSRSIPDAIRAHNQFQYSVVWLPVANQWRSLRKILNSNIFSGNRLDANQHLRWRKVQELIAYVRKSSQVGDAVDIGRAAFRTSLNLLSNTIFSVDLADPNNDSAKEFKDLVSNIMVEAGKPNLVDYFPVLEKIDPQGIRRRMTIHFGKVLEMFGRLINERLEFRRLRSSVISNDVLDVLLNTEESGNEIDRNHIERMCLDLFVAGTDTTSSTLEWAMAEVLHNPETLVKAKAELEQIIGRGKAIEESDISNLPYLRSIIKETLRLHPPVPFLIPRKVEVDSEVSGYTVPKGSQVLVNAWAIGRDPCCWENPLNFSPERFLNSELDVRGRDFELIPFGAGRRICPGLPLAIRMVPVMLGSLLNSFDWKLDGGIKPEELDMEEKFGITLQKAQPLRAVPTLVGGGSGGSTSSGSSGGWRKGAGSAKKVVEPPKLVLPKALSETEEVDDGKKKVTIFFGTQTGTAEGFAKALAEEAKARYPQANFKVVDMDDYAAEDEEYEEKLTKETMAFFFLATYGDGEPTDNAARFYKWFAEGKERGDSFKNLHYGVFGLGNRQYEHFNKIAIVVDNILAEQGGKRLVPVGLGDDDQCIEDDFAAWRENVWPELDNLLRNEDDASTVSTPYTAAVLEYRVEFHDQSDELSLENSLANGHANGNASYDAQHPCRANVAVKRELHTPLSDRSCTHLEFDISGTGLQYETGDHVGVYCENLIETVEEAERLLGLSPQTYFSVHTDKEDGTPLGGSALPPPFPPCTLRTALSRYADLLNAPKKSALTALAAYASDPTEADRLKHLASPAGKEEYAQYVVASQRTLLEVMADFPSAKPPLGVFFAGVAPRLQPRFYSISSSPKIAPFRIHVTCALVYDKTPTGRIHKGICSTWIKNAVPLEESSDCSSAPIFVRNSNFKLPSDANIPIIMIGPGTGLAPFRGFLQERLALKESGAELGPAILFFGCRNRKMDFIYEDELNDFVKAGVVSELIVAFSREGSTKEYVQHKMAQRASDVWKMISDGGYIYVCGDAKGMARDVHRTLHTIAQEQGSMSSSEAEGMVKNLQMTGRYLRDVW

SEQ ID NO: 665 - protein, 1159 aa, Artificial Sequence
  G8H-CPR engineered fusion
MDFFSFLLYFLFTLSLVQATISLVRGSKHKGRKLPPGPAPLPIVGNLLKLGDQPHKSLADLAKIHGPIMTLKLGHITTVIISSSDLAKEVLQKQDLAFSSRSIPDAIRAHNQFQYSVVWLPVANQWRSLRKILNSNIFSGNRLDANQHLRWRKVQELIAYVRKSSQVGDAVDIGRAAFRTSLNLLSNTIFSVDLADPNNDSAKEFKDLVSNIMVEAGKPNLVDYFPVLEKIDPQGIRRRMTIHFGKVLEMFGRLINERLEFRRLRSSVISNDVLDVLLNTEESGNEIDRNHIERMCLDLFVAGTDTTSSTLEWAMAEVLHNPETLVKAKAELEQIIGRGKAIEESDISNLPYLRSIIKETLRLHPPVPFLIPRKVEVDSEVSGYTVPKGSQVLVNAWAIGRDPCCWENPLNFSPERFLNSELDVRGRDFELIPFGAGRRICPGLPLAIRMVPVMLGSLLNSFDWKLDGGIKPEELDMEEKFGITLQKAQPLRAVPTLVGGGSGGSTSSGSSGGWRRSSGSGKKVVEPPKLIVPKSVVEPEEIDEGKKKFTIFFGTQTGTAEGFAKALAEEAKARYEKAVIKVIDIDDYAADDEEYEEKFRKETLAFFILATYGDGEPTDNAARFYKWFVEGNDRGDWLKNLQYGVFGLGNRQYEHFNKIAKVVDEKVAEQGGKRIVPLVLGDDDQCIEDDFAAWRENVWPELDNLLRDEDDTTVSTTYTAAIPEYRVVFPDKSDSLISEANGHANGYANGNTVYDAQHPCRSNVAVRKELHTPASDRSCTHLDFDIAGTGLSYGTGDHVGVYCDNLSETVEEAERLLNLPPETYFSLHADKEDGTPLAGSSLPPPFPPCTLRTALTRYADLLNTPKKSALLALAAYASDPNEADRLKYLASPAGKDEYAQSLVANQRSLLEVMAEFPSAKPPLGVFFAAIAPRLQPRFYSISSSPRMAPSRIHVTCALVYEKTPGGRIHKGVCSTWMKNAIPLEESRDCSWAPIFVRQSNFKLPADPKVPVIMIGPGTGLAPFRGFLQERLALKEEGAELGTAVFFFGCRNRKMDYIYEDELNHFLEIGALSELLVAFSREGPTKQYVQHKMAEKASDIWRMISDGAYVYVCGDAKGMARDVHRTLHTIAQEQGSMDSTQAEGFVKNLQMTGRYLRDVW

SEQ ID NO: 666 - protein, 1150 aa, Artificial Sequence
  G8H-CPR engineered fusion
MDYLTIALGLLFALTFYQGLTYLSRRSQKLPPGPLPLPIIGNLHLLGDHPHKSLAKLSKKYGPIMSLKLGRITTLVISSSTTAKEVLQKQDLAFSSRSVPNALHAHNQFQYSVVWLPVASRWRSLRKILNSNIFSGNRLDANQHLRCRKVEELIAYCRKNCQSGEAVDLGRAAFRTSLNLLSNTIFSKDLTDPYSDSAKEFKDLVWNIMVEAGKPNLVDFFPVLEKVDPQGIRRRMTVHFGKVIQLFNGLINERLDKRKSRGGYNDVLDVLLTTTEENPEEIDRTHIERMCLDLFVAGTDTTSSTLEWAMAEMLRNPEKMKKTQEELAEVVGRGKLIEEGDVSRLPYLRCVVKETLRVHPPVPFLIPRKVVQDVEVCGYKVPKGSQVLVNAWAIGRDETFWKDALGFKPERFLESELDTRGRDFELIPFGAGRRICPGLPLANRMVPVMLGSLLNSFNWKLEGGIAPKDLDMEEKFGITLQKAHPLRAVPSPLGGGSGGSTSSGSSGGWKKTTADRSGELKPLMIPKSLMAKDEDDDLDLGSGKTRVSIFFGTQTGTAEGFAKALSEEIKARYEKAAVKDDYAADDDQYEEKLKKETLAFFCVATYGDGEPTDNAARFYKWFTEENERDIKLQQLAYGVFALGNRQYEHFNKIGIVLDEELCKKGAKRLIEVGLGDDDQSIEDDFNAWKESLWSELDKLLKDEDDKSVATPYTAVIPEYRVVTHDPRFTTQKSMESNVANGNTTIDIHHPCRVDVAVQKELHTHESDRSCIHLEFDISRTGITYETGDHVGVYAENHVEIVEEAGKLLGHSLDLVFSIHADKEDGSPLESAVPPPFPGPCTLGTGLARYADLLNPPRKSALVALAAYATEPSEAEKLKHLTSPDGKDEYSQWIVASQRSLLEVMAAFPSAKPPLGVFFAAIAPRLQPRYYSISSSPRLAPSRVHVTSALVYGPTPTGRIHKGVCSTWMKNAVPAEKSHECSGAPIFIRASNFKLPSNPSTPIVMVGPGTGLAPFRGFLQERMALKEDGEELGSSLLFFGCRNRQMDFIYEDELNNFVDQGVISELIMAFSREGAQKEYVQHKMMEKAAQVWDLIKEEGYLYVCGDAKGMARDVHRTLHTIVQEQEGVSSSEAEAIVKKLQTEGRYLRDVW

SEQ ID NO: 667 - protein, 1154 aa, Artificial Sequence
  G8H-CPR engineered fusion
MDYLTIALGLLFALTFYQGLTYLSRRSQKLPPGPLPLPIIGNLHLLGDHPHKSLAKLSKKYGPIMSLKLGRITTLVISSSTTAKEVLQKQDLAFSSRSVPNALHAHNQFQYSVVWLPVASRWRSLRKILNSNIFSGNRLDANQHLRCRKVEELIAYCRKNCQSGEAVDLGRAAFRTSLNLLSNTIFSKDLTDPYSDSAKEFKDLVWNIMVEAGKPNLVDFFPVLEKVDPQGIRRRMTVHFGKVIQLFNGLINERLDKRKSRGGYNDVLDVLLTTTEENPEEIDRTHIERMCLDLFVAGTDTTSSTLEWAMAEMLRNPEKMKKTQEELAEVVGRGKLIEEGDVSRLPYLRCVVKETLRVHPPVPFLIPRKVVQDVEVCGYKVPKGSQVLVNAWAIGRDETFWKDALGFKPERFLESELDTRGRDFELIPFGAGRRICPGLPLANRMVPVMLGSLLNSFNWKLEGGIAPKDLDMEEKFGITLQKAHPLRAVPSPLGGGSGGSTSSGSSGGWRRSSDRSKESNPVVVPRPLLVEAEEDEVEVGSGKTKLTIFYGTQTGTAEGFAKALAEEIKARYEKAVVKVVDLDDYADDDEQYEEKLKKETLAFFMVATYGDGEPTDNAARFYKWFTDGKERGLWLQQLKFGVFGLGNRQYEHFNKIGKVLDQDLSEQGGKRLIPVGLGDDDQCIEDDFAAWRELLWPELDQLLRDGDDTNTVSTPYTAVIPEYRVVIYDPTTTSFEDKHLSMANGNASYDIHHPCRVNVAVQRELHKPESDRSCIHLEFDISSTGITYETGDHVGVYADNCDETVEEAARLLGQPLDLLFSIHSDDDNGTPLGGSLPPPFPGPCTLRTALARYADLLNPPRKAALIALAAHAIEPSESEKLKFLSSPQGKDDYSQWVVGSQRSLLEVMAEFPSAKPPLGVFFAAVATRLQPRYYSISSSPRFAPSRVHVTCSLVYGPTSTGRIHKGVCSTWMKNAVPLEKSRNCSWAPIFIRASNFKLPSNPSIPIVMVGPGTGLAPFRGFLQERLALKEDGIQLGPALLFFGCRNRRMDFIYEDELNNFVDRGVLSDLIVAFSREGPQKEYVQHKMMEKAAYIWNLISQEGYLYVCGDAKGMARDVHRTLHTIVQEQENADTSKAESVVKKLQMDGRYLRDVW

SEQ ID NO: 668 - protein, 1154 aa, Artificial Sequence
  G8H-CPR engineered fusion
MDYLTIALGLLFALTFYQGLTYLSRRSQKLPPGPLPLPIIGNLHLLGDHPHKSLAKLSKKYGPIMSLKLGRITTLVISSSTTAKEVLQKQDLAFSSRSVPNALHAHNQFQYSVVWLPVASRWRSLRKILNSNIFSGNRLDANQHLRCRKVEELIAYCRKNCQSGEAVDLGRAAFRTSLNLLSNTIFSKDLTDPYSDSAKEFKDLVWNIMVEAGKPNLVDFFPVLEKVDPQGIRRRMTVHFGKVIQLFNGLINERLDKRKSRGGYNDVLDVLLTTTEENPEEIDRTHIERMCLDLFVAGTDTTSSTLEWAMAEMLRNPEKMKKTQEELAEVVGRGKLIEEGDVSRLPYLRCVVKETLRVHPPVPFLIPRKVVQDVEVCGYKVPKGSQVLVNAWAIGRDETFWKDALGFKPERFLESELDTRGRDFELIPFGAGRRICPGLPLANRMVPVMLGSLLNSFNWKLEGGIAPKDLDMEEKFGITLQKAHPLRAVPSPLGGGSGGSTSSGSSGGWRKGAGSAKKVVEPPKLVLPKALSETEEVDDGKKKVTIFFGTQTGTAEGFAKALAEEAKARYPQANFKVVDMDDYAAEDEEYEEKLTKETMAFFFLATYGDGEPTDNAARFYKWFAEGKERGDSFKNLHYGVFGLGNRQYEHFNKIAIVVDNILAEQGGKRLVPVGLGDDDQCIEDDFAAWRENVWPELDNLLRNEDDASTVSTPYTAAVLEYRVEFHDQSDELSLENSLANGHANGNASYDAQHPCRANVAVKRELHTPLSDRSCTHLEFDISGTGLQYETGDHVGVYCENLIETVEEAERLLGLSPQTYFSVHTDKEDGTPLGGSALPPPFPPCTLRTALSRYADLLNAPKKSALTALAAYASDPTEADRLKHLASPAGKEEYAQYVVASQRTLLEVMADFPSAKPPLGVFFAGVAPRLQPRFYSISSSPKIAPFRIHVTCALVYDKTPTGRIHKGICSTWIKNAVPLEESSDCSSAPIFVRNSNFKLPSDANIPIIMIGPGTGLAPFRGFLQERLALKESGAELGPAILFFGCRNRKMDFIYEDELNDFVKAGVVSELIVAFSREGSTKEYVQHKMAQRASDVWKMISDGGYIYVCGDAKGMARDVHRTLHTIAQEQGSMSSSEAEGMVKNLQMTGRYLRDVW

SEQ ID NO: 669 - protein, 1154 aa, Artificial Sequence
  G8H-CPR engineered fusion
MDYLTIALGLLFALTFYQGLTYLSRRSQKLPPGPLPLPIIGNLHLLGDHPHKSLAKLSKKYGPIMSLKLGRITTLVISSSTTAKEVLQKQDLAFSSRSVPNALHAHNQFQYSVVWLPVASRWRSLRKILNSNIFSGNRLDANQHLRCRKVEELIAYCRKNCQSGEAVDLGRAAFRTSLNLLSNTIFSKDLTDPYSDSAKEFKDLVWNIMVEAGKPNLVDFFPVLEKVDPQGIRRRMTVHFGKVIQLFNGLINERLDKRKSRGGYNDVLDVLLTTTEENPEEIDRTHIERMCLDLFVAGTDTTSSTLEWAMAEMLRNPEKMKKTQEELAEVVGRGKLIEEGDVSRLPYLRCVVKETLRVHPPVPFLIPRKVVQDVEVCGYKVPKGSQVLVNAWAIGRDETFWKDALGFKPERFLESELDTRGRDFELIPFGAGRRICPGLPLANRMVPVMLGSLLNSFNWKLEGGIAPKDLDMEEKFGITLQKAHPLRAVPSPLGGGSGGSTSSGSSGGWRRSSGSGKKVVEPPKLIVPKSVVEPEEIDEGKKKFTIFFGTQTGTAEGFAKALAEEAKARYEKAVIKVIDIDDYAADDEEYEEKFRKETLAFFILATYGDGEPTDNAARFYKWFVEGNDRGDWLKNLQYGVFGLGNRQYEHFNKIAKVVDEKVAEQGGKRIVPLVLGDDDQCIEDDFAAWRENVWPELDNLLRDEDDTTVSTTYTAAIPEYRVVFPDKSDSLISEANGHANGYANGNTVYDAQHPCRSNVAVRKELHTPASDRSCTHLDFDIAGTGLSYGTGDHVGVYCDNLSETVEEAERLLNLPPETYFSLHADKEDGTPLAGSSLPPPFPPCTLRTALTRYADLLNTPKKSALLALAAYASDPNEADRLKYLASPAGKDEYAQSLVANQRSLLEVMAEFPSAKPPLGVFFAAIAPRLQPRFYSISSSPRMAPSRIHVTCALVYEKTPGGRIHKGVCSTWMKNAIPLEESRDCSWAPIFVRQSNFKLPADPKVPVIMIGPGTGLAPFRGFLQERLALKEEGAELGTAVFFFGCRNRKMDYIYEDELNHFLEIGALSELLVAFSREGPTKQYVQHKMAEKASDIWRMISDGAYVYVCGDAKGMARDVHRTLHTIAQEQGSMDSTQAEGFVKNLQMTGRYLRDVW

SEQ ID NO: 670 - protein, 1155 aa, Artificial Sequence
  G8H-CPR engineered fusion
MDFFTIALSLLFAFTLFKAIISLTKSGKNKNLPPGPAPLPIIGSLHKLGDQPHQSLAKLAKIYGPIMSLKLGRITTVVISSSDAAKEVLQKKDLAFSSRHVPDALHAHNQFKFSVVWLPVAPQWRSLRKILNSNIFSGNRLDANQHLRCRKVEELITYCRKSSHSGDAVDIGRAAFRTSLNLLSNTIFSKDLTDPYQDSAKEFKELVGNIMVEAGKPNLVDFFPSLKKIDPQGIRHRMTIHFGKVLELFGGLINERLELKSSQKSDEKNDVLDVCLSISKENPDEIDRTHIERMCLDLFVAGTDTTSSTLEWAMAEVLRNPETLVKAKAELEEVIGKGKILAEADVSNLPYLRCIVKETLRIHPPVPFLIPRKVEMDVEACGYTVPKNSQVFVNVWAIGRDPTLWEDPLSFKPERFMASELDVRGRDFELLPFGAGRRICPGLPLAIRMVPVMLGSLVNSFNWKLDGGIAPKELDMGEKFGITLAKAQSLRAVPSPLVGGGSGGSTSSGSSGGWKKTTADRSGELKPLMIPKSLMAKDEDDDLDLGSGKTRVSIFFGTQTGTAEGFAKALSEEIKARYEKAAVKDDYAADDDQYEEKLKKETLAFFCVATYGDGEPTDNAARFYKWFTEENERDIKLQQLAYGVFALGNRQYEHFNKIGIVLDEELCKKGAKRLIEVGLGDDDQSIEDDFNAWKESLWSELDKLLKDEDDKSVATPYTAVIPEYRVVTHDPRFTTQKSMESNVANGNTTIDIHHPCRVDVAVQKELHTHESDRSCIHLEFDISRTGITYETGDHVGVYAENHVEIVEEAGKLLGHSLDLVFSIHADKEDGSPLESAVPPPFPGPCTLGTGLARYADLLNPPRKSALVALAAYATEPSEAEKLKHLTSPDGKDEYSQWIVASQRSLLEVMAAFPSAKPPLGVFFAAIAPRLQPRYYSISSSPRLAPSRVHVTSALVYGPTPTGRIHKGVCSTWMKNAVPAEKSHECSGAPIFIRASNFKLPSNPSTPIVMVGPGTGLAPFRGFLQERMALKEDGEELGSSLLFFGCRNRQMDFIYEDELNNFVDQGVISELIMAFSREGAQKEYVQHKMMEKAAQVWDLIKEEGYLYVCGDAKGMARDVHRTLHTIVQEQEGVSSSEAEAIVKKLQTEGRYLRDVW

SEQ ID NO: 671 - protein, 1159 aa, Artificial Sequence
  G8H-CPR engineered fusion
MDFFTIALSLLFAFTLFKAIISLTKSGKNKNLPPGPAPLPIIGSLHKLGDQPHQSLAKLAKIYGPIMSLKLGRITTVVISSSDAAKEVLQKKDLAFSSRHVPDALHAHNQFKFSVVWLPVAPQWRSLRKILNSNIFSGNRLDANQHLRCRKVEELITYCRKSSHSGDAVDIGRAAFRTSLNLLSNTIFSKDLTDPYQDSAKEFKELVGNIMVEAGKPNLVDFFPSLKKIDPQGIRHRMTIHFGKVLELFGGLINERLELKSSQKSDEKNDVLDVCLSISKENPDEIDRTHIERMCLDLFVAGTDTTSSTLEWAMAEVLRNPETLVKAKAELEEVIGKGKILAEADVSNLPYLRCIVKETLRIHPPVPFLIPRKVEMDVEACGYTVPKNSQVFVNVWAIGRDPTLWEDPLSFKPERFMASELDVRGRDFELLPFGAGRRICPGLPLAIRMVPVMLGSLVNSFNWKLDGGIAPKELDMGEKFGITLAKAQSLRAVPSPLVGGGSGGSTSSGSSGGWRRSSDRSKESNPVVVPRPLLVEAEEDEVEVGSGKTKLTIFYGTQTGTAEGFAKALAEEIKARYEKAVVKVVDLDDYADDDEQYEEKLKKETLAFFMVATYGDGEPTDNAARFYKWFTDGKERGLWLQQLKFGVFGLGNRQYEHFNKIGKVLDQDLSEQGGKRLIPVGLGDDDQCIEDDFAAWRELLWPELDQLLRDGDDTNTVSTPYTAVIPEYRVVIYDPTTTSFEDKHLSMANGNASYDIHHPCRVNVAVQRELHKPESDRSCIHLEFDISSTGITYETGDHVGVYADNCDETVEEAARLLGQPLDLLFSIHSDDDNGTPLGGSLPPPFPGPCTLRTALARYADLLNPPRKAALIALAAHAIEPSESEKLKFLSSPQGKDDYSQWVVGSQRSLLEVMAEFPSAKPPLGVFFAAVATRLQPRYYSISSSPRFAPSRVHVTCSLVYGPTSTGRIHKGVCSTWMKNAVPLEKSRNCSWAPIFIRASNFKLPSNPSIPIVMVGPGTGLAPFRGFLQERLALKEDGIQLGPALLFFGCRNRRMDFIYEDELNNFVDRGVLSDLIVAFSREGPQKEYVQHKMMEKAAYIWNLISQEGYLYVCGDAKGMARDVHRTLHTIVQEQENADTSKAESVVKKLQMDGRYLRDVW

SEQ ID NO: 672 - protein, 1159 aa, Artificial Sequence
  G8H-CPR engineered fusion
MDFFTIALSLLFAFTLFKAIISLTKSGKNKNLPPGPAPLPIIGSLHKLGDQPHQSLAKLAKIYGPIMSLKLGRITTVVISSSDAAKEVLQKKDLAFSSRHVPDALHAHNQFKFSVVWLPVAPQWRSLRKILNSNIFSGNRLDANQHLRCRKVEELITYCRKSSHSGDAVDIGRAAFRTSLNLLSNTIFSKDLTDPYQDSAKEFKELVGNIMVEAGKPNLVDFFPSLKKIDPQGIRHRMTIHFGKVLELFGGLINERLELKSSQKSDEKNDVLDVCLSISKENPDEIDRTHIERMCLDLFVAGTDTTSSTLEWAMAEVLRNPETLVKAKAELEEVIGKGKILAEADVSNLPYLRCIVKETLRIHPPVPFLIPRKVEMDVEACGYTVPKNSQVFVNVWAIGRDPTLWEDPLSFKPERFMASELDVRGRDFELLPFGAGRRICPGLPLAIRMVPVMLGSLVNSFNWKLDGGIAPKELDMGEKFGITLAKAQSLRAVPSPLVGGGSGGSTSSGSSGGWRKGAGSAKKVVEPPKLVLPKALSETEEVDDGKKKVTIFFGTQTGTAEGFAKALAEEAKARYPQANFKVVDMDDYAAEDEEYEEKLTKETMAFFFLATYGDGEPTDNAARFYKWFAEGKERGDSFKNLHYGVFGLGNRQYEHFNKIAIVVDNILAEQGGKRLVPVGLGDDDQCIEDDFAAWRENVWPELDNLLRNEDDASTVSTPYTAAVLEYRVEFHDQSDELSLENSLANGHANGNASYDAQHPCRANVAVKRELHTPLSDRSCTHLEFDISGTGLQYETGDHVGVYCENLIETVEEAERLLGLSPQTYFSVHTDKEDGTPLGGSALPPPFPPCTLRTALSRYADLLNAPKKSALTALAAYASDPTEADRLKHLASPAGKEEYAQYVVASQRTLLEVMADFPSAKPPLGVFFAGVAPRLQPRFYSISSSPKIAPFRIHVTCALVYDKTPTGRIHKGICSTWIKNAVPLEESSDCSSAPIFVRNSNFKLPSDANIPIIMIGPGTGLAPFRGFLQERLALKESGAELGPAILFFGCRNRKMDFIYEDELNDFVKAGVVSELIVAFSREGSTKEYVQHKMAQRASDVWKMISDGGYIYVCGDAKGMARDVHRTLHTIAQEQGSMSSSEAEGMVKNLQMTGRYLRDVW

SEQ ID NO: 673 - protein, 1159 aa, Artificial Sequence
  G8H-CPR engineered fusion
MDFFTIALSLLFAFTLFKAIISLTKSGKNKNLPPGPAPLPIIGSLHKLGDQPHQSLAKLAKIYGPIMSLKLGRITTVVISSSDAAKEVLQKKDLAFSSRHVPDALHAHNQFKFSVVWLPVAPQWRSLRKILNSNIFSGNRLDANQHLRCRKVEELITYCRKSSHSGDAVDIGRAAFRTSLNLLSNTIFSKDLTDPYQDSAKEFKELVGNIMVEAGKPNLVDFFPSLKKIDPQGIRHRMTIHFGKVLELFGGLINERLELKSSQKSDEKNDVLDVCLSISKENPDEIDRTHIERMCLDLFVAGTDTTSSTLEWAMAEVLRNPETLVKAKAELEEVIGKGKILAEADVSNLPYLRCIVKETLRIHPPVPFLIPRKVEMDVEACGYTVPKNSQVFVNVWAIGRDPTLWEDPLSFKPERFMASELDVRGRDFELLPFGAGRRICPGLPLAIRMVPVMLGSLVNSFNWKLDGGIAPKELDMGEKFGITLAKAQSLRAVPSPLVGGGSGGSTSSGSSGGWRRSSGSGKKVVEPPKLIVPKSVVEPEEIDEGKKKFTIFFGTQTGTAEGFAKALAEEAKARYEKAVIKVIDIDDYAADDEEYEEKFRKETLAFFILATYGDGEPTDNAARFYKWFVEGNDRGDWLKNLQYGVFGLGNRQYEHFNKIAKVVDEKVAEQGGKRIVPLVLGDDDQCIEDDFAAWRENVWPELDNLLRDEDDTTVSTTYTAAIPEYRVVFPDKSDSLISEANGHANGYANGNTVYDAQHPCRSNVAVRKELHTPASDRSCTHLDFDIAGTGLSYGTGDHVGVYCDNLSETVEEAERLLNLPPETYFSLHADKEDGTPLAGSSLPPPFPPCTLRTALTRYADLLNTPKKSALLALAAYASDPNEADRLKYLASPAGKDEYAQSLVANQRSLLEVMAEFPSAKPPLGVFFAAIAPRLQPRFYSISSSPRMAPSRIHVTCALVYEKTPGGRIHKGVCSTWMKNAIPLEESRDCSWAPIFVRQSNFKLPADPKVPVIMIGPGTGLAPFRGFLQERLALKEEGAELGTAVFFFGCRNRKMDYIYEDELNHFLEIGALSELLVAFSREGPTKQYVQHKMAEKASDIWRMISDGAYVYVCGDAKGMARDVHRTLHTIAQEQGSMDSTQAEGFVKNLQMTGRYLRDVW

SEQ ID NO: 674 - protein, 1153 aa, Artificial Sequence; identical to SEQ ID NO: 633
  G8H-CPR engineered fusion

SEQ ID NO: 675 - protein, 1293 aa, Artificial Sequence
  G8H-CPR-CYB5 engineered fusion
MDFLTIFIGPLLAIIALFYARLTISTRGKNLPPGPTPLPFIGNLHLLGHHPHKSLARLAKTYGPLMLLRLGSENTVVVSSAAVAKEVLQKHDLAFSSRSIPDAVHAHDQFKYSVVWLPVASRWRSLRKTMNSNIFSGSCLDANQHLRSRKVEELIAYCKESCRRAEAVDVGRAAFRTALNSLSNTIFSRDLADPLSDSGKEFKDVVSSIMMEAGKPNSVDYYPFLSRFDPQGIRRRTAIYFDKLINIFKGLIDERLEKRRSQYEEATDVIDILLNTIEQNPEEIDRTHIERMFLDLFLAGTDTTSSTVEWAMAEAMKNPETMKKAKAELAQVIGKGKIVQETDIPHLPYLQCIVKETLRLHPPVPFLIPRRVHEDVDILGYVVPNNSQVFVNMWAIGRDPDMWKNPLQFDPDRFHDSEVGLRGKDFELIPFGAGRRICPGLPLAMRMVPVVLGSLLNSFDWKVEGGKELEMNEKFGITLEKAQPLMAVPIALGGGSGGSTSSGSSGGWRRSSGSGKKVVEPPKLIVPKSVVEPEEIDEGKKKFTIFFGTQTGTAEGFAKALAEEAKARYEKAVIKVIDIDDYAADDEEYEEKFRKETLAFFILATYGDGEPTDNAARFYKWFVEGNDRGDWLKNLQYGVFGLGNRQYEHFNKIAKVVDEKVAEQGGKRIVPLVLGDDDQCIEDDFAAWRENVWPELDNLLRDEDDTTVSTTYTAAIPEYRVVFPDKSDSLISEANGHANGYANGNTVYDAQHPCRSNVAVRKELHTPASDRSCTHLDFDIAGTGLSYGTGDHVGVYCDNLSETVEEAERLLNLPPETYFSLHADKEDGTPLAGSSLPPPFPPCTLRTALTRYADLLNTPKKSALLALAAYASDPNEADRLKYLASPAGKDEYAQSLVANQRSLLEVMAEFPSAKPPLGVFFAAIAPRLQPRFYSISSSPRMAPSRIHVTCALVYEKTPGGRIHKGVCSTWMKNAIPLEESRDCSWAPIFVRQSNFKLPADPKVPVIMIGPGTGLAPFRGFLQERLALKEEGAELGTAVFFFGCRNRKMDYIYEDELNHFLEIGALSELLVAFSREGPTKQYVQHKMAEKASDIWRMISDGAYVYVCGDAKGMARDVHRTLHTIAQEQGSMDSTQAEGFVKNLQMTGRYLRDVWGSTSSGMASDQKLHKFDEVSKHNKTKDCWLIINGKVYDVTPFMDDHPGGDEVLLSATGKDATNDFEDVGHSDSAREMMDKYYIGEMDMATVPLKRTYIPPQQAQYNPDKTPEFVIKILQFLVPLLILGLAFAVRHYTKEK

SEQ ID NO: 676 - protein, 1270 aa, Artificial Sequence
  G8H-CPR-CYB5 engineered fusion
MDFLTIFIGPLLAIIALFYARLTISTRGKNLPPGPTPLPFIGNLHLLGHHPHKSLARLAKTYGPLMLLRLGSENTVVVSSAAVAKEVLQKHDLAFSSRSIPDAVHAHDQFKYSVVWLPVASRWRSLRKTMNSNIFSGSCLDANQHLRSRKVEELIAYCKESCRRAEAVDVGRAAFRTALNSLSNTIFSRDLADPLSDSGKEFKDVVSSIMMEAGKPNSVDYYPFLSRFDPQGIRRRTAIYFDKLINIFKGLIDERLEKRRSQYEEATDVIDILLNTIEQNPEEIDRTHIERMFLDLFLAGTDTTSSTVEWAMAEAMKNPETMKKAKAELAQVIGKGKIVQETDIPHLPYLQCIVKETLRLHPPVPFLIPRRVHEDVDILGYVVPNNSQVFVNMWAIGRDPDMWKNPLQFDPDRFHDSEVGLRGKDFELIPFGAGRRICPGLPLAMRMVPVVLGSLLNSFDWKVEGGKELEMNEKFGITLEKAQPLMAVPIALGGGSGGSTSSGSSGGWRRSSGSGKKVVEPPKLIVPKSVVEPEEIDEGKKKFTIFFGTQTGTAEGFAKALAEEAKARYEKAVIKVIDIDDYAADDEEYEEKFRKETLAFFILATYGDGEPTDNAARFYKWFVEGNDRGDWLKNLQYGVFGLGNRQYEHFNKIAKVVDEKVAEQGGKRIVPLVLGDDDQCIEDDFAAWRENVWPELDNLLRDEDDTTVSTTYTAAIPEYRVVFPDKSDSLISEANGHANGYANGNTVYDAQHPCRSNVAVRKELHTPASDRSCTHLDFDIAGTGLSYGTGDHVGVYCDNLSETVEEAERLLNLPPETYFSLHADKEDGTPLAGSSLPPPFPPCTLRTALTRYADLLNTPKKSALLALAAYASDPNEADRLKYLASPAGKDEYAQSLVANQRSLLEVMAEFPSAKPPLGVFFAAIAPRLQPRFYSISSSPRMAPSRIHVTCALVYEKTPGGRIHKGVCSTWMKNAIPLEESRDCSWAPIFVRQSNFKLPADPKVPVIMIGPGTGLAPFRGFLQERLALKEEGAELGTAVFFFGCRNRKMDYIYEDELNHFLEIGALSELLVAFSREGPTKQYVQHKMAEKASDIWRMISDGAYVYVCGDAKGMARDVHRTLHTIAQEQGSMDSTQAEGFVKNLQMTGRYLRDVWGSTSSGMASDQKLHKFDEVSKHNKTKDCWLIINGKVYDVTPFMDDHPGGDEVLLSATGKDATNDFEDVGHSDSAREMMDKYYIGEMDMATVPLKRTYIPPQQAQYNPDKTPEYTKEK

SEQ ID NO: 677 - protein, 1265 aa, Artificial Sequence
  G8H-CPR-CYB5 engineered fusion
MDFLTIFIGPLLAIIALFYARLTISTRGKNLPPGPTPLPFIGNLHLLGHHPHKSLARLAKTYGPLMLLRLGSENTVVVSSAAVAKEVLQKHDLAFSSRSIPDAVHAHDQFKYSVVWLPVASRWRSLRKTMNSNIFSGSCLDANQHLRSRKVEELIAYCKESCRRAEAVDVGRAAFRTALNSLSNTIFSRDLADPLSDSGKEFKDVVSSIMMEAGKPNSVDYYPFLSRFDPQGIRRRTAIYFDKLINIFKGLIDERLEKRRSQYEEATDVIDILLNTIEQNPEEIDRTHIERMFLDLFLAGTDTTSSTVEWAMAEAMKNPETMKKAKAELAQVIGKGKIVQETDIPHLPYLQCIVKETLRLHPPVPFLIPRRVHEDVDILGYVVPNNSQVFVNMWAIGRDPDMWKNPLQFDPDRFHDSEVGLRGKDFELIPFGAGRRICPGLPLAMRMVPVVLGSLLNSFDWKVEGGKELEMNEKFGITLEKAQPLMAVPIALGGGSGGSTSSGSSGGWRRSSGSGKKVVEPPKLIVPKSVVEPEEIDEGKKKFTIFFGTQTGTAEGFAKALAEEAKARYEKAVIKVIDIDDYAADDEEYEEKFRKETLAFFILATYGDGEPTDNAARFYKWFVEGNDRGDWLKNLQYGVFGLGNRQYEHFNKIAKVVDEKVAEQGGKRIVPLVLGDDDQCIEDDFAAWRENVWPELDNLLRDEDDTTVSTTYTAAIPEYRVVFPDKSDSLISEANGHANGYANGNTVYDAQHPCRSNVAVRKELHTPASDRSCTHLDFDIAGTGLSYGTGDHVGVYCDNLSETVEEAERLLNLPPETYFSLHADKEDGTPLAGSSLPPPFPPCTLRTALTRYADLLNTPKKSALLALAAYASDPNEADRLKYLASPAGKDEYAQSLVANQRSLLEVMAEFPSAKPPLGVFFAAIAPRLQPRFYSISSSPRMAPSRIHVTCALVYEKTPGGRIHKGVCSTWMKNAIPLEESRDCSWAPIFVRQSNFKLPADPKVPVIMIGPGTGLAPFRGFLQERLALKEEGAELGTAVFFFGCRNRKMDYIYEDELNHFLEIGALSELLVAFSREGPTKQYVQHKMAEKASDIWRMISDGAYVYVCGDAKGMARDVHRTLHTIAQEQGSMDSTQAEGFVKNLQMTGRYLRDVWGSTSSGMASDQKLHKFDEVSKHNKTKDCWLIINGKVYDVTPFMDDHPGGDEVLLSATGKDATNDFEDVGHSDSAREMMDKYYIGEMDMATVPLKRTYIPPQQAQYNPDKTPE

SEQ ID NO: 678 - protein, 1297 aa, Artificial Sequence
  G8H-CPR-CYB5 engineered fusion
MDFLTIFIGPLLAIIALFYARLTISTRGKNLPPGPTPLPFIGNLHLLGHHPHKSLARLAKTYGPLMLLRLGSENTVVVSSAAVAKEVLQKHDLAFSSRSIPDAVHAHDQFKYSVVWLPVASRWRSLRKTMNSNIFSGSCLDANQHLRSRKVEELIAYCKESCRRAEAVDVGRAAFRTALNSLSNTIFSRDLADPLSDSGKEFKDVVSSIMMEAGKPNSVDYYPFLSRFDPQGIRRRTAIYFDKLINIFKGLIDERLEKRRSQYEEATDVIDILLNTIEQNPEEIDRTHIERMFLDLFLAGTDTTSSTVEWAMAEAMKNPETMKKAKAELAQVIGKGKIVQETDIPHLPYLQCIVKETLRLHPPVPFLIPRRVHEDVDILGYVVPNNSQVFVNMWAIGRDPDMWKNPLQFDPDRFHDSEVGLRGKDFELIPFGAGRRICPGLPLAMRMVPVVLGSLLNSFDWKVEGGKELEMNEKFGITLEKAQPLMAVPIALGGGSGGSTSSGSSGGWRRSSGSGKKVVEPPKLIVPKSVVEPEEIDEGKKKFTIFFGTQTGTAEGFAKALAEEAKARYEKAVIKVIDIDDYAADDEEYEEKFRKETLAFFILATYGDGEPTDNAARFYKWFVEGNDRGDWLKNLQYGVFGLGNRQYEHFNKIAKVVDEKVAEQGGKRIVPLVLGDDDQCIEDDFAAWRENVWPELDNLLRDEDDTTVSTTYTAAIPEYRVVFPDKSDSLISEANGHANGYANGNTVYDAQHPCRSNVAVRKELHTPASDRSCTHLDFDIAGTGLSYGTGDHVGVYCDNLSETVEEAERLLNLPPETYFSLHADKEDGTPLAGSSLPPPFPPCTLRTALTRYADLLNTPKKSALLALAAYASDPNEADRLKYLASPAGKDEYAQSLVANQRSLLEVMAEFPSAKPPLGVFFAAIAPRLQPRFYSISSSPRMAPSRIHVTCALVYEKTPGGRIHKGVCSTWMKNAIPLEESRDCSWAPIFVRQSNFKLPADPKVPVIMIGPGTGLAPFRGFLQERLALKEEGAELGTAVFFFGCRNRKMDYIYEDELNHFLEIGALSELLVAFSREGPTKQYVQHKMAEKASDIWRMISDGAYVYVCGDAKGMARDVHRTLHTIAQEQGSMDSTQAEGFVKNLQMTGRYLRDVWGSTSSGMPTLTKLYTMEEASQHNTNEDCWIVIDGKVYDVSSYVDDHPGGDDILVGATGKDATDEFEDAGHSKSARELMEKFCIGELEETTPSIPELDIVSQKQKMNDLPHKILNFTKQYWFASITVAGLSVVVGYLCIRKKQTT

SEQ ID NO: 679 - protein, 1277 aa, Artificial Sequence
  G8H-CPR-CYB5 engineered fusion
MDFLTIFIGPLLAIIALFYARLTISTRGKNLPPGPTPLPFIGNLHLLGHHPHKSLARLAKTYGPLMLLRLGSENTVVVSSAAVAKEVLQKHDLAFSSRSIPDAVHAHDQFKYSVVWLPVASRWRSLRKTMNSNIFSGSCLDANQHLRSRKVEELIAYCKESCRRAEAVDVGRAAFRTALNSLSNTIFSRDLADPLSDSGKEFKDVVSSIMMEAGKPNSVDYYPFLSRFDPQGIRRRTAIYFDKLINIFKGLIDERLEKRRSQYEEATDVIDILLNTIEQNPEEIDRTHIERMFLDLFLAGTDTTSSTVEWAMAEAMKNPETMKKAKAELAQVIGKGKIVQETDIPHLPYLQCIVKETLRLHPPVPFLIPRRVHEDVDILGYVVPNNSQVFVNMWAIGRDPDMWKNPLQFDPDRFHDSEVGLRGKDFELIPFGAGRRICPGLPLAMRMVPVVLGSLLNSFDWKVEGGKELEMNEKFGITLEKAQPLMAVPIALGGGSGGSTSSGSSGGWRRSSGSGKKVVEPPKLIVPKSVVEPEEIDEGKKKFTIFFGTQTGTAEGFAKALAEEAKARYEKAVIKVIDIDDYAADDEEYEEKFRKETLAFFILATYGDGEPTDNAARFYKWFVEGNDRGDWLKNLQYGVFGLGNRQYEHFNKIAKVVDEKVAEQGGKRIVPLVLGDDDQCIEDDFAAWRENVWPELDNLLRDEDDTTVSTTYTAAIPEYRVVFPDKSDSLISEANGHANGYANGNTVYDAQHPCRSNVAVRKELHTPASDRSCTHLDFDIAGTGLSYGTGDHVGVYCDNLSETVEEAERLLNLPPETYFSLHADKEDGTPLAGSSLPPPFPPCTLRTALTRYADLLNTPKKSALLALAAYASDPNEADRLKYLASPAGKDEYAQSLVANQRSLLEVMAEFPSAKPPLGVFFAAIAPRLQPRFYSISSSPRMAPSRIHVTCALVYEKTPGGRIHKGVCSTWMKNAIPLEESRDCSWAPIFVRQSNFKLPADPKVPVIMIGPGTGLAPFRGFLQERLALKEEGAELGTAVFFFGCRNRKMDYIYEDELNHFLEIGALSELLVAFSREGPTKQYVQHKMAEKASDIWRMISDGAYVYVCGDAKGMARDVHRTLHTIAQEQGSMDSTQAEGFVKNLQMTGRYLRDVWGSTSSGMPTLTKLYTMEEASQHNTNEDCWIVIDGKVYDVSSYVDDHPGGDDILVGATGKDATDEFEDAGHSKSARELMEKFCIGELEETTPSIPELDIVSQKQKMNDLPHKILNFTKQRKKQTT

SEQ ID NO: 680 - protein, 1271 aa, Artificial Sequence
  G8H-CPR-CYB5 engineered fusion
MDFLTIFIGPLLAIIALFYARLTISTRGKNLPPGPTPLPFIGNLHLLGHHPHKSLARLAKTYGPLMLLRLGSENTVVVSSAAVAKEVLQKHDLAFSSRSIPDAVHAHDQFKYSVVWLPVASRWRSLRKTMNSNIFSGSCLDANQHLRSRKVEELIAYCKESCRRAEAVDVGRAAFRTALNSLSNTIFSRDLADPLSDSGKEFKDVVSSIMMEAGKPNSVDYYPFLSRFDPQGIRRRTAIYFDKLINIFKGLIDERLEKRRSQYEEATDVIDILLNTIEQNPEEIDRTHIERMFLDLFLAGTDTTSSTVEWAMAEAMKNPETMKKAKAELAQVIGKGKIVQETDIPHLPYLQCIVKETLRLHPPVPFLIPRRVHEDVDILGYVVPNNSQVFVNMWAIGRDPDMWKNPLQFDPDRFHDSEVGLRGKDFELIPFGAGRRICPGLPLAMRMVPVVLGSLLNSFDWKVEGGKELEMNEKFGITLEKAQPLMAVPIALGGGSGGSTSSGSSGGWRRSSGSGKKVVEPPKLIVPKSVVEPEEIDEGKKKFTIFFGTQTGTAEGFAKALAEEAKARYEKAVIKVIDIDDYAADDEEYEEKFRKETLAFFILATYGDGEPTDNAARFYKWFVEGNDRGDWLKNLQYGVFGLGNRQYEHFNKIAKVVDEKVAEQGGKRIVPLVLGDDDQCIEDDFAAWRENVWPELDNLLRDEDDTTVSTTYTAAIPEYRVVFPDKSDSLISEANGHANGYANGNTVYDAQHPCRSNVAVRKELHTPASDRSCTHLDFDIAGTGLSYGTGDHVGVYCDNLSETVEEAERLLNLPPETYFSLHADKEDGTPLAGSSLPPPFPPCTLRTALTRYADLLNTPKKSALLALAAYASDPNEADRLKYLASPAGKDEYAQSLVANQRSLLEVMAEFPSAKPPLGVFFAAIAPRLQPRFYSISSSPRMAPSRIHVTCALVYEKTPGGRIHKGVCSTWMKNAIPLEESRDCSWAPIFVRQSNFKLPADPKVPVIMIGPGTGLAPFRGFLQERLALKEEGAELGTAVFFFGCRNRKMDYIYEDELNHFLEIGALSELLVAFSREGPTKQYVQHKMAEKASDIWRMISDGAYVYVCGDAKGMARDVHRTLHTIAQEQGSMDSTQAEGFVKNLQMTGRYLRDVWGSTSSGMPTLTKLYTMEEASQHNTNEDCWIVIDGKVYDVSSYVDDHPGGDDILVGATGKDATDEFEDAGHSKSARELMEKFCIGELEETTPSIPELDIVSQKQKMNDLPHKILNFTKQ

SEQ ID NO: 681 - protein, 1253 aa, Artificial Sequence
  G8H-CPR-CYB5 engineered fusion
MALLLAVFRLTISTRGKNLPPGPTPLPFIGNLHLLGHHPHKSLARLAKTYGPLMLLRLGSENTVVVSSAAVAKEVLQKHDLAFSSRSIPDAVHAHDQFKYSVVWLPVASRWRSLRKTMNSNIFSGSCLDANQHLRSRKVEELIAYCKESCRRAEAVDVGRAAFRTALNSLSNTIFSRDLADPLSDSGKEFKDVVSSIMMEAGKPNSVDYYPFLSRFDPQGIRRRTAIYFDKLINIFKGLIDERLEKRRSQYEEATDVIDILLNTIEQNPEEIDRTHIERMFLDLFLAGTDTTSSTVEWAMAEAMKNPETMKKAKAELAQVIGKGKIVQETDIPHLPYLQCIVKETLRLHPPVPFLIPRRVHEDVDILGYVVPNNSQVFVNMWAIGRDPDMWKNPLQFDPDRFHDSEVGLRGKDFELIPFGAGRRICPGLPLAMRMVPVVLGSLLNSFDWKVEGGKELEMNEKFGITLEKAQPLMAVPIALGGGSGGSTSSGSSGGWRRSSGSGKKVVEPPKLIVPKSVVEPEEIDEGKKKFTIFFGTQTGTAEGFAKALAEEAKARYEKAVIKVIDIDDYAADDEEYEEKFRKETLAFFILATYGDGEPTDNAARFYKWFVEGNDRGDWLKNLQYGVFGLGNRQYEHFNKIAKVVDEKVAEQGGKRIVPLVLGDDDQCIEDDFAAWRENVWPELDNLLRDEDDTTVSTTYTAAIPEYRVVFPDKSDSLISEANGHANGYANGNTVYDAQHPCRSNVAVRKELHTPASDRSCTHLDFDIAGTGLSYGTGDHVGVYCDNLSETVEEAERLLNLPPETYFSLHADKEDGTPLAGSSLPPPFPPCTLRTALTRYADLLNTPKKSALLALAAYASDPNEADRLKYLASPAGKDEYAQSLVANQRSLLEVMAEFPSAKPPLGVFFAAIAPRLQPRFYSISSSPRMAPSRIHVTCALVYEKTPGGRIHKGVCSTWMKNAIPLEESRDCSWAPIFVRQSNFKLPADPKVPVIMIGPGTGLAPFRGFLQERLALKEEGAELGTAVFFFGCRNRKMDYIYEDELNHFLEIGALSELLVAFSREGPTKQYVQHKMAEKASDIWRMISDGAYVYVCGDAKGMARDVHRTLHTIAQEQGSMDSTQAEGFVKNLQMTGRYLRDVWGSTSSGMASDQKLHKFDEVSKHNKTKDCWLIINGKVYDVTPFMDDHPGGDEVLLSATGKDATNDFEDVGHSDSAREMMDKYYIGEMDMATVPLKRTYIPPQQAQYNPDKTPE

SEQ ID NO: 682 - protein, 1302 aa, Artificial Sequence
  G8H-CPR-CYB5 engineered fusion
MDFLTIFIGPLLAIIALFYARLTISTRGKNLPPGPTPLPFIGNLHLLGHHPHKSLARLAKTYGPLMLLRLGSENTVVVSSAAVAKEVLQKHDLAFSSRSIPDAVHAHDQFKYSVVWLPVASRWRSLRKTMNSNIFSGSCLDANQHLRSRKVEELIAYCKESCRRAEAVDVGRAAFRTALNSLSNTIFSRDLADPLSDSGKEFKDVVSSIMMEAGKPNSVDYYPFLSRFDPQGIRRRTAIYFDKLINIFKGLIDERLEKRRSQYEEATDVIDILLNTIEQNPEEIDRTHIERMFLDLFLAGTDTTSSTVEWAMAEAMKNPETMKKAKAELAQVIGKGKIVQETDIPHLPYLQCIVKETLRLHPPVPFLIPRRVHEDVDILGYVVPNNSQVFVNMWAIGRDPDMWKNPLQFDPDRFHDSEVGLRGKDFELIPFGAGRRICPGLPLAMRMVPVVLGSLLNSFDWKVEGGKELEMNEKFGITLEKAQPLMAVPIALGGGSGGSTSSGSSGGWRRSSGSGKKVVEPPKLIVPKSVVEPEEIDEGKKKFTIFFGTQTGTAEGFAKALAEEAKARYEKAVIKVIDIDDYAADDEEYEEKFRKETLAFFILATYGDGEPTDNAARFYKWFVEGNDRGDWLKNLQYGVFGLGNRQYEHFNKIAKVVDEKVAEQGGKRIVPLVLGDDDQCIEDDFAAWRENVWPELDNLLRDEDDTTVSTTYTAAIPEYRVVFPDKSDSLISEANGHANGYANGNTVYDAQHPCRSNVAVRKELHTPASDRSCTHLDFDIAGTGLSYGTGDHVGVYCDNLSETVEEAERLLNLPPETYFSLHADKEDGTPLAGSSLPPPFPPCTLRTALTRYADLLNTPKKSALLALAAYASDPNEADRLKYLASPAGKDEYAQSLVANQRSLLEVMAEFPSAKPPLGVFFAAIAPRLQPRFYSISSSPRMAPSRIHVTCALVYEKTPGGRIHKGVCSTWMKNAIPLEESRDCSWAPIFVRQSNFKLPADPKVPVIMIGPGTGLAPFRGFLQERLALKEEGAELGTAVFFFGCRNRKMDYIYEDELNHFLEIGALSELLVAFSREGPTKQYVQHKMAEKASDIWRMISDGAYVYVCGDAKGMARDVHRTLHTIAQEQGSMDSTQAEGFVKNLQMTGRYLRDVWGGGSGGSTSSGSSGGMASDQKLHKFDEVSKHNKTKDCWLIINGKVYDVTPFMDDHPGGDEVLLSATGKDATNDFEDVGHSDSAREMMDKYYIGEMDMATVPLKRTYIPPQQAQYNPDKTPEFVIKILQFLVPLLILGLAFAVRHYTKEK

SEQ ID NO: 683 - protein, 1279 aa, Artificial Sequence
  G8H-CPR-CYB5 engineered fusion
MDFLTIFIGPLLAIIALFYARLTISTRGKNLPPGPTPLPFIGNLHLLGHHPHKSLARLAKTYGPLMLLRLGSENTVVVSSAAVAKEVLQKHDLAFSSRSIPDAVHAHDQFKYSVVWLPVASRWRSLRKTMNSNIFSGSCLDANQHLRSRKVEELIAYCKESCRRAEAVDVGRAAFRTALNSLSNTIFSRDLADPLSDSGKEFKDVVSSIMMEAGKPNSVDYYPFLSRFDPQGIRRRTAIYFDKLINIFKGLIDERLEKRRSQYEEATDVIDILLNTIEQNPEEIDRTHIERMFLDLFLAGTDTTSSTVEWAMAEAMKNPETMKKAKAELAQVIGKGKIVQETDIPHLPYLQCIVKETLRLHPPVPFLIPRRVHEDVDILGYVVPNNSQVFVNMWAIGRDPDMWKNPLQFDPDRFHDSEVGLRGKDFELIPFGAGRRICPGLPLAMRMVPVVLGSLLNSFDWKVEGGKELEMNEKFGITLEKAQPLMAVPIALGGGSGGSTSSGSSGGWRRSSGSGKKVVEPPKLIVPKSVVEPEEIDEGKKKFTIFFGTQTGTAEGFAKALAEEAKARYEKAVIKVIDIDDYAADDEEYEEKFRKETLAFFILATYGDGEPTDNAARFYKWFVEGNDRGDWLKNLQYGVFGLGNRQYEHFNKIAKVVDEKVAEQGGKRIVPLVLGDDDQCIEDDFAAWRENVWPELDNLLRDEDDTTVSTTYTAAIPEYRVVFPDKSDSLISEANGHANGYANGNTVYDAQHPCRSNVAVRKELHTPASDRSCTHLDFDIAGTGLSYGTGDHVGVYCDNLSETVEEAERLLNLPPETYFSLHADKEDGTPLAGSSLPPPFPPCTLRTALTRYADLLNTPKKSALLALAAYASDPNEADRLKYLASPAGKDEYAQSLVANQRSLLEVMAEFPSAKPPLGVFFAAIAPRLQPRFYSISSSPRMAPSRIHVTCALVYEKTPGGRIHKGVCSTWMKNAIPLEESRDCSWAPIFVRQSNFKLPADPKVPVIMIGPGTGLAPFRGFLQERLALKEEGAELGTAVFFFGCRNRKMDYIYEDELNHFLEIGALSELLVAFSREGPTKQYVQHKMAEKASDIWRMISDGAYVYVCGDAKGMARDVHRTLHTIAQEQGSMDSTQAEGFVKNLQMTGRYLRDVWGGGSGGSTSSGSSGGMASDQKLHKFDEVSKHNKTKDCWLIINGKVYDVTPFMDDHPGGDEVLLSATGKDATNDFEDVGHSDSAREMMDKYYIGEMDMATVPLKRTYIPPQQAQYNPDKTPEYTKEK

SEQ ID NO: 684 - protein, 1274 aa, Artificial Sequence
  G8H-CPR-CYB5 engineered fusion
MDFLTIFIGPLLAIIALFYARLTISTRGKNLPPGPTPLPFIGNLHLLGHHPHKSLARLAKTYGPLMLLRLGSENTVVVSSAAVAKEVLQKHDLAFSSRSIPDAVHAHDQFKYSVVWLPVASRWRSLRKTMNSNIFSGSCLDANQHLRSRKVEELIAYCKESCRRAEAVDVGRAAFRTALNSLSNTIFSRDLADPLSDSGKEFKDVVSSIMMEAGKPNSVDYYPFLSRFDPQGIRRRTAIYFDKLINIFKGLIDERLEKRRSQYEEATDVIDILLNTIEQNPEEIDRTHIERMFLDLFLAGTDTTSSTVEWAMAEAMKNPETMKKAKAELAQVIGKGKIVQETDIPHLPYLQCIVKETLRLHPPVPFLIPRRVHEDVDILGYVVPNNSQVFVNMWAIGRDPDMWKNPLQFDPDRFHDSEVGLRGKDFELIPFGAGRRICPGLPLAMRMVPVVLGSLLNSFDWKVEGGKELEMNEKFGITLEKAQPLMAVPIALGGGSGGSTSSGSSGGWRRSSGSGKKVVEPPKLIVPKSVVEPEEIDEGKKKFTIFFGTQTGTAEGFAKALAEEAKARYEKAVIKVIDIDDYAADDEEYEEKFRKETLAFFILATYGDGEPTDNAARFYKWFVEGNDRGDWLKNLQYGVFGLGNRQYEHFNKIAKVVDEKVAEQGGKRIVPLVLGDDDQCIEDDFAAWRENVWPELDNLLRDEDDTTVSTTYTAAIPEYRVVFPDKSDSLISEANGHANGYANGNTVYDAQHPCRSNVAVRKELHTPASDRSCTHLDFDIAGTGLSYGTGDHVGVYCDNLSETVEEAERLLNLPPETYFSLHADKEDGTPLAGSSLPPPFPPCTLRTALTRYADLLNTPKKSALLALAAYASDPNEADRLKYLASPAGKDEYAQSLVANQRSLLEVMAEFPSAKPPLGVFFAAIAPRLQPRFYSISSSPRMAPSRIHVTCALVYEKTPGGRIHKGVCSTWMKNAIPLEESRDCSWAPIFVRQSNFKLPADPKVPVIMIGPGTGLAPFRGFLQERLALKEEGAELGTAVFFFGCRNRKMDYIYEDELNHFLEIGALSELLVAFSREGPTKQYVQHKMAEKASDIWRMISDGAYVYVCGDAKGMARDVHRTLHTIAQEQGSMDSTQAEGFVKNLQMTGRYLRDVWGGGSGGSTSSGSSGGMASDQKLHKFDEVSKHNKTKDCWLIINGKVYDVTPFMDDHPGGDEVLLSATGKDATNDFEDVGHSDSAREMMDKYYIGEMDMATVPLKRTYIPPQQAQYNPDKTPE

SEQ ID NO: 685 - protein, 1306 aa, Artificial Sequence
  G8H-CPR-CYB5 engineered fusion
MDFLTIFIGPLLAIIALFYARLTISTRGKNLPPGPTPLPFIGNLHLLGHHPHKSLARLAKTYGPLMLLRLGSENTVVVSSAAVAKEVLQKHDLAFSSRSIPDAVHAHDQFKYSVVWLPVASRWRSLRKTMNSNIFSGSCLDANQHLRSRKVEELIAYCKESCRRAEAVDVGRAAFRTALNSLSNTIFSRDLADPLSDSGKEFKDVVSSIMMEAGKPNSVDYYPFLSRFDPQGIRRRTAIYFDKLINIFKGLIDERLEKRRSQYEEATDVIDILLNTIEQNPEEIDRTHIERMFLDLFLAGTDTTSSTVEWAMAEAMKNPETMKKAKAELAQVIGKGKIVQETDIPHLPYLQCIVKETLRLHPPVPFLIPRRVHEDVDILGYVVPNNSQVFVNMWAIGRDPDMWKNPLQFDPDRFHDSEVGLRGKDFELIPFGAGRRICPGLPLAMRMVPVVLGSLLNSFDWKVEGGKELEMNEKFGITLEKAQPLMAVPIALGGGSGGSTSSGSSGGWRRSSGSGKKVVEPPKLIVPKSVVEPEEIDEGKKKFTIFFGTQTGTAEGFAKALAEEAKARYEKAVIKVIDIDDYAADDEEYEEKFRKETLAFFILATYGDGEPTDNAARFYKWFVEGNDRGDWLKNLQYGVFGLGNRQYEHFNKIAKVVDEKVAEQGGKRIVPLVLGDDDQCIEDDFAAWRENVWPELDNLLRDEDDTTVSTTYTAAIPEYRVVFPDKSDSLISEANGHANGYANGNTVYDAQHPCRSNVAVRKELHTPASDRSCTHLDFDIAGTGLSYGTGDHVGVYCDNLSETVEEAERLLNLPPETYFSLHADKEDGTPLAGSSLPPPFPPCTLRTALTRYADLLNTPKKSALLALAAYASDPNEADRLKYLASPAGKDEYAQSLVANQRSLLEVMAEFPSAKPPLGVFFAAIAPRLQPRFYSISSSPRMAPSRIHVTCALVYEKTPGGRIHKGVCSTWMKNAIPLEESRDCSWAPIFVRQSNFKLPADPKVPVIMIGPGTGLAPFRGFLQERLALKEEGAELGTAVFFFGCRNRKMDYIYEDELNHFLEIGALSELLVAFSREGPTKQYVQHKMAEKASDIWRMISDGAYVYVCGDAKGMARDVHRTLHTIAQEQGSMDSTQAEGFVKNLQMTGRYLRDVWGGGSGGSTSSGSSGGMPTLTKLYTMEEASQHNTNEDCWIVIDGKVYDVSSYVDDHPGGDDILVGATGKDATDEFEDAGHSKSARELMEKFCIGELEETTPSIPELDIVSQKQKMNDLPHKILNFTKQYWFASITVAGLSVVVGYLCIRKKQTT

SEQ ID NO: 686 - protein, 1286 aa, Artificial Sequence
  G8H-CPR-CYB5 engineered fusion
MDFLTIFIGPLLAIIALFYARLTISTRGKNLPPGPTPLPFIGNLHLLGHHPHKSLARLAKTYGPLMLLRLGSENTVVVSSAAVAKEVLQKHDLAFSSRSIPDAVHAHDQFKYSVVWLPVASRWRSLRKTMNSNIFSGSCLDANQHLRSRKVEELIAYCKESCRRAEAVDVGRAAFRTALNSLSNTIFSRDLADPLSDSGKEFKDVVSSIMMEAGKPNSVDYYPFLSRFDPQGIRRRTAIYFDKLINIFKGLIDERLEKRRSQYEEATDVIDILLNTIEQNPEEIDRTHIERMFLDLFLAGTDTTSSTVEWAMAEAMKNPETMKKAKAELAQVIGKGKIVQETDIPHLPYLQCIVKETLRLHPPVPFLIPRRVHEDVDILGYVVPNNSQVFVNMWAIGRDPDMWKNPLQFDPDRFHDSEVGLRGKDFELIPFGAGRRICPGLPLAMRMVPVVLGSLLNSFDWKVEGGKELEMNEKFGITLEKAQPLMAVPIALGGGSGGSTSSGSSGGWRRSSGSGKKVVEPPKLIVPKSVVEPEEIDEGKKKFTIFFGTQTGTAEGFAKALAEEAKARYEKAVIKVIDIDDYAADDEEYEEKFRKETLAFFILATYGDGEPTDNAARFYKWFVEGNDRGDWLKNLQYGVFGLGNRQYEHFNKIAKVVDEKVAEQGGKRIVPLVLGDDDQCIEDDFAAWRENVWPELDNLLRDEDDTTVSTTYTAAIPEYRVVFPDKSDSLISEANGHANGYANGNTVYDAQHPCRSNVAVRKELHTPASDRSCTHLDFDIAGTGLSYGTGDHVGVYCDNLSETVEEAERLLNLPPETYFSLHADKEDGTPLAGSSLPPPFPPCTLRTALTRYADLLNTPKKSALLALAAYASDPNEADRLKYLASPAGKDEYAQSLVANQRSLLEVMAEFPSAKPPLGVFFAAIAPRLQPRFYSISSSPRMAPSRIHVTCALVYEKTPGGRIHKGVCSTWMKNAIPLEESRDCSWAPIFVRQSNFKLPADPKVPVIMIGPGTGLAPFRGFLQERLALKEEGAELGTAVFFFGCRNRKMDYIYEDELNHFLEIGALSELLVAFSREGPTKQYVQHKMAEKASDIWRMISDGAYVYVCGDAKGMARDVHRTLHTIAQEQGSMDSTQAEGFVKNLQMTGRYLRDVWGGGSGGSTSSGSSGGMPTLTKLYTMEEASQHNTNEDCWIVIDGKVYDVSSYVDDHPGGDDILVGATGKDATDEFEDAGHSKSARELMEKFCIGELEETTPSIPELDIVSQKQKMNDLPHKILNFTKQRKKQTT

SEQ ID NO: 687 - protein, 1280 aa, Artificial Sequence
  G8H-CPR-CYB5 engineered fusion
MDFLTIFIGPLLAIIALFYARLTISTRGKNLPPGPTPLPFIGNLHLLGHHPHKSLARLAKTYGPLMLLRLGSENTVVVSSAAVAKEVLQKHDLAFSSRSIPDAVHAHDQFKYSVVWLPVASRWRSLRKTMNSNIFSGSCLDANQHLRSRKVEELIAYCKESCRRAEAVDVGRAAFRTALNSLSNTIFSRDLADPLSDSGKEFKDVVSSIMMEAGKPNSVDYYPFLSRFDPQGIRRRTAIYFDKLINIFKGLIDERLEKRRSQYEEATDVIDILLNTIEQNPEEIDRTHIERMFLDLFLAGTDTTSSTVEWAMAEAMKNPETMKKAKAELAQVIGKGKIVQETDIPHLPYLQCIVKETLRLHPPVPFLIPRRVHEDVDILGYVVPNNSQVFVNMWAIGRDPDMWKNPLQFDPDRFHDSEVGLRGKDFELIPFGAGRRICPGLPLAMRMVPVVLGSLLNSFDWKVEGGKELEMNEKFGITLEKAQPLMAVPIALGGGSGGSTSSGSSGGWRRSSGSGKKVVEPPKLIVPKSVVEPEEIDEGKKKFTIFFGTQTGTAEGFAKALAEEAKARYEKAVIKVIDIDDYAADDEEYEEKFRKETLAFFILATYGDGEPTDNAARFYKWFVEGNDRGDWLKNLQYGVFGLGNRQYEHFNKIAKVVDEKVAEQGGKRIVPLVLGDDDQCIEDDFAAWRENVWPELDNLLRDEDDTTVSTTYTAAIPEYRVVFPDKSDSLISEANGHANGYANGNTVYDAQHPCRSNVAVRKELHTPASDRSCTHLDFDIAGTGLSYGTGDHVGVYCDNLSETVEEAERLLNLPPETYFSLHADKEDGTPLAGSSLPPPFPPCTLRTALTRYADLLNTPKKSALLALAAYASDPNEADRLKYLASPAGKDEYAQSLVANQRSLLEVMAEFPSAKPPLGVFFAAIAPRLQPRFYSISSSPRMAPSRIHVTCALVYEKTPGGRIHKGVCSTWMKNAIPLEESRDCSWAPIFVRQSNFKLPADPKVPVIMIGPGTGLAPFRGFLQERLALKEEGAELGTAVFFFGCRNRKMDYIYEDELNHFLEIGALSELLVAFSREGPTKQYVQHKMAEKASDIWRMISDGAYVYVCGDAKGMARDVHRTLHTIAQEQGSMDSTQAEGFVKNLQMTGRYLRDVWGGGSGGSTSSGSSGGMPTLTKLYTMEEASQHNTNEDCWIVIDGKVYDVSSYVDDHPGGDDILVGATGKDATDEFEDAGHSKSARELMEKFCIGELEETTPSIPELDIVSQKQKMNDLPHKILNFTKQ

SEQ ID NO: 688 - protein, 1287 aa, Artificial Sequence
  G8H-CPR-CYB5 engineered fusion
MDFLTIFIGPLLAIIALFYARLTISTRGKNLPPGPTPLPFIGNLHLLGHHPHKSLARLAKTYGPLMLLRLGSENTVVVSSAAVAKEVLQKHDLAFSSRSIPDAVHAHDQFKYSVVWLPVASRWRSLRKTMNSNIFSGSCLDANQHLRSRKVEELIAYCKESCRRAEAVDVGRAAFRTALNSLSNTIFSRDLADPLSDSGKEFKDVVSSIMMEAGKPNSVDYYPFLSRFDPQGIRRRTAIYFDKLINIFKGLIDERLEKRRSQYEEATDVIDILLNTIEQNPEEIDRTHIERMFLDLFLAGTDTTSSTVEWAMAEAMKNPETMKKAKAELAQVIGKGKIVQETDIPHLPYLQCIVKETLRLHPPVPFLIPRRVHEDVDILGYVVPNNSQVFVNMWAIGRDPDMWKNPLQFDPDRFHDSEVGLRGKDFELIPFGAGRRICPGLPLAMRMVPVVLGSLLNSFDWKVEGGKELEMNEKFGITLEKAQPLMAVPIALGGGSGGSTSSGSSGGWRRSSGSGKKVVEPPKLIVPKSVVEPEEIDEGKKKFTIFFGTQTGTAEGFAKALAEEAKARYEKAVIKVIDIDDYAADDEEYEEKFRKETLAFFILATYGDGEPTDNAARFYKWFVEGNDRGDWLKNLQYGVFGLGNRQYEHFNKIAKVVDEKVAEQGGKRIVPLVLGDDDQCIEDDFAAWRENVWPELDNLLRDEDDTTVSTTYTAAIPEYRVVFPDKSDSLISEANGHANGYANGNTVYDAQHPCRSNVAVRKELHTPASDRSCTHLDFDIAGTGLSYGTGDHVGVYCDNLSETVEEAERLLNLPPETYFSLHADKEDGTPLAGSSLPPPFPPCTLRTALTRYADLLNTPKKSALLALAAYASDPNEADRLKYLASPAGKDEYAQSLVANQRSLLEVMAEFPSAKPPLGVFFAAIAPRLQPRFYSISSSPRMAPSRIHVTCALVYEKTPGGRIHKGVCSTWMKNAIPLEESRDCSWAPIFVRQSNFKLPADPKVPVIMIGPGTGLAPFRGFLQERLALKEEGAELGTAVFFFGCRNRKMDYIYEDELNHFLEIGALSELLVAFSREGPTKQYVQHKMAEKASDIWRMISDGAYVYVCGDAKGMARDVHRTLHTIAQEQGSMDSTQAEGFVKNLQMTGRYLRDVWMASDQKLHKFDEVSKHNKTKDCWLIINGKVYDVTPFMDDHPGGDEVLLSATGKDATNDFEDVGHSDSAREMMDKYYIGEMDMATVPLKRTYIPPQQAQYNPDKTPEFVIKILQFLVPLLILGLAFAVRHYTKEK

SEQ ID NO: 689 - protein, 1264 aa, Artificial Sequence
  G8H-CPR-CYB5 engineered fusion
MDFLTIFIGPLLAIIALFYARLTISTRGKNLPPGPTPLPFIGNLHLLGHHPHKSLARLAKTYGPLMLLRLGSENTVVVSSAAVAKEVLQKHDLAFSSRSIPDAVHAHDQFKYSVVWLPVASRWRSLRKTMNSNIFSGSCLDANQHLRSRKVEELIAYCKESCRRAEAVDVGRAAFRTALNSLSNTIFSRDLADPLSDSGKEFKDVVSSIMMEAGKPNSVDYYPFLSRFDPQGIRRRTAIYFDKLINIFKGLIDERLEKRRSQYEEATDVIDILLNTIEQNPEEIDRTHIERMFLDLFLAGTDTTSSTVEWAMAEAMKNPETMKKAKAELAQVIGKGKIVQETDIPHLPYLQCIVKETLRLHPPVPFLIPRRVHEDVDILGYVVPNNSQVFVNMWAIGRDPDMWKNPLQFDPDRFHDSEVGLRGKDFELIPFGAGRRICPGLPLAMRMVPVVLGSLLNSFDWKVEGGKELEMNEKFGITLEKAQPLMAVPIALGGGSGGSTSSGSSGGWRRSSGSGKKVVEPPKLIVPKSVVEPEEIDEGKKKFTIFFGTQTGTAEGFAKALAEEAKARYEKAVIKVIDIDDYAADDEEYEEKFRKETLAFFILATYGDGEPTDNAARFYKWFVEGNDRGDWLKNLQYGVFGLGNRQYEHFNKIAKVVDEKVAEQGGKRIVPLVLGDDDQCIEDDFAAWRENVWPELDNLLRDEDDTTVSTTYTAAIPEYRVVFPDKSDSLISEANGHANGYANGNTVYDAQHPCRSNVAVRKELHTPASDRSCTHLDFDIAGTGLSYGTGDHVGVYCDNLSETVEEAERLLNLPPETYFSLHADKEDGTPLAGSSLPPPFPPCTLRTALTRYADLLNTPKKSALLALAAYASDPNEADRLKYLASPAGKDEYAQSLVANQRSLLEVMAEFPSAKPPLGVFFAAIAPRLQPRFYSISSSPRMAPSRIHVTCALVYEKTPGGRIHKGVCSTWMKNAIPLEESRDCSWAPIFVRQSNFKLPADPKVPVIMIGPGTGLAPFRGFLQERLALKEEGAELGTAVFFFGCRNRKMDYIYEDELNHFLEIGALSELLVAFSREGPTKQYVQHKMAEKASDIWRMISDGAYVYVCGDAKGMARDVHRTLHTIAQEQGSMDSTQAEGFVKNLQMTGRYLRDVWMASDQKLHKFDEVSKHNKTKDCWLIINGKVYDVTPFMDDHPGGDEVLLSATGKDATNDFEDVGHSDSAREMMDKYYIGEMDMATVPLKRTYIPPQQAQYNPDKTPEYTKEK

SEQ ID NO: 690 - protein, 1259 aa, Artificial Sequence
  G8H-CPR-CYB5 engineered fusion
MDFLTIFIGPLLAIIALFYARLTISTRGKNLPPGPTPLPFIGNLHLLGHHPHKSLARLAKTYGPLMLLRLGSENTVVVSSAAVAKEVLQKHDLAFSSRSIPDAVHAHDQFKYSVVWLPVASRWRSLRKTMNSNIFSGSCLDANQHLRSRKVEELIAYCKESCRRAEAVDVGRAAFRTALNSLSNTIFSRDLADPLSDSGKEFKDVVSSIMMEAGKPNSVDYYPFLSRFDPQGIRRRTAIYFDKLINIFKGLIDERLEKRRSQYEEATDVIDILLNTIEQNPEEIDRTHIERMFLDLFLAGTDTTSSTVEWAMAEAMKNPETMKKAKAELAQVIGKGKIVQETDIPHLPYLQCIVKETLRLHPPVPFLIPRRVHEDVDILGYVVPNNSQVFVNMWAIGRDPDMWKNPLQFDPDRFHDSEVGLRGKDFELIPFGAGRRICPGLPLAMRMVPVVLGSLLNSFDWKVEGGKELEMNEKFGITLEKAQPLMAVPIALGGGSGGSTSSGSSGGWRRSSGSGKKVVEPPKLIVPKSVVEPEEIDEGKKKFTIFFGTQTGTAEGFAKALAEEAKARYEKAVIKVIDIDDYAADDEEYEEKFRKETLAFFILATYGDGEPTDNAARFYKWFVEGNDRGDWLKNLQYGVFGLGNRQYEHFNKIAKVVDEKVAEQGGKRIVPLVLGDDDQCIEDDFAAWRENVWPELDNLLRDEDDTTVSTTYTAAIPEYRVVFPDKSDSLISEANGHANGYANGNTVYDAQHPCRSNVAVRKELHTPASDRSCTHLDFDIAGTGLSYGTGDHVGVYCDNLSETVEEAERLLNLPPETYFSLHADKEDGTPLAGSSLPPPFPPCTLRTALTRYADLLNTPKKSALLALAAYASDPNEADRLKYLASPAGKDEYAQSLVANQRSLLEVMAEFPSAKPPLGVFFAAIAPRLQPRFYSISSSPRMAPSRIHVTCALVYEKTPGGRIHKGVCSTWMKNAIPLEESRDCSWAPIFVRQSNFKLPADPKVPVIMIGPGTGLAPFRGFLQERLALKEEGAELGTAVFFFGCRNRKMDYIYEDELNHFLEIGALSELLVAFSREGPTKQYVQHKMAEKASDIWRMISDGAYVYVCGDAKGMARDVHRTLHTIAQEQGSMDSTQAEGFVKNLQMTGRYLRDVWMASDQKLHKFDEVSKHNKTKDCWLIINGKVYDVTPFMDDHPGGDEVLLSATGKDATNDFEDVGHSDSAREMMDKYYIGEMDMATVPLKRTYIPPQQAQYNPDKTPE

SEQ ID NO: 691 - protein, 1291 aa, Artificial Sequence
  G8H-CPR-CYB5 engineered fusion
MDFLTIFIGPLLAIIALFYARLTISTRGKNLPPGPTPLPFIGNLHLLGHHPHKSLARLAKTYGPLMLLRLGSENTVVVSSAAVAKEVLQKHDLAFSSRSIPDAVHAHDQFKYSVVWLPVASRWRSLRKTMNSNIFSGSCLDANQHLRSRKVEELIAYCKESCRRAEAVDVGRAAFRTALNSLSNTIFSRDLADPLSDSGKEFKDVVSSIMMEAGKPNSVDYYPFLSRFDPQGIRRRTAIYFDKLINIFKGLIDERLEKRRSQYEEATDVIDILLNTIEQNPEEIDRTHIERMFLDLFLAGTDTTSSTVEWAMAEAMKNPETMKKAKAELAQVIGKGKIVQETDIPHLPYLQCIVKETLRLHPPVPFLIPRRVHEDVDILGYVVPNNSQVFVNMWAIGRDPDMWKNPLQFDPDRFHDSEVGLRGKDFELIPFGAGRRICPGLPLAMRMVPVVLGSLLNSFDWKVEGGKELEMNEKFGITLEKAQPLMAVPIALGGGSGGSTSSGSSGGWRRSSGSGKKVVEPPKLIVPKSVVEPEEIDEGKKKFTIFFGTQTGTAEGFAKALAEEAKARYEKAVIKVIDIDDYAADDEEYEEKFRKETLAFFILATYGDGEPTDNAARFYKWFVEGNDRGDWLKNLQYGVFGLGNRQYEHFNKIAKVVDEKVAEQGGKRIVPLVLGDDDQCIEDDFAAWRENVWPELDNLLRDEDDTTVSTTYTAAIPEYRVVFPDKSDSLISEANGHANGYANGNTVYDAQHPCRSNVAVRKELHTPASDRSCTHLDFDIAGTGLSYGTGDHVGVYCDNLSETVEEAERLLNLPPETYFSLHADKEDGTPLAGSSLPPPFPPCTLRTALTRYADLLNTPKKSALLALAAYASDPNEADRLKYLASPAGKDEYAQSLVANQRSLLEVMAEFPSAKPPLGVFFAAIAPRLQPRFYSISSSPRMAPSRIHVTCALVYEKTPGGRIHKGVCSTWMKNAIPLEESRDCSWAPIFVRQSNFKLPADPKVPVIMIGPGTGLAPFRGFLQERLALKEEGAELGTAVFFFGCRNRKMDYIYEDELNHFLEIGALSELLVAFSREGPTKQYVQHKMAEKASDIWRMISDGAYVYVCGDAKGMARDVHRTLHTIAQEQGSMDSTQAEGFVKNLQMTGRYLRDVWMPTLTKLYTMEEASQHNTNEDCWIVIDGKVYDVSSYVDDHPGGDDILVGATGKDATDEFEDAGHSKSARELMEKFCIGELEETTPSIPELDIVSQKQKMNDLPHKILNFTKQYWFASITVAGLSVVVGYLCIRKKQTT

SEQ ID NO: 692 - protein, 1271 aa, Artificial Sequence
  G8H-CPR-CYB5 engineered fusion
MDFLTIFIGPLLAIIALFYARLTISTRGKNLPPGPTPLPFIGNLHLLGHHPHKSLARLAKTYGPLMLLRLGSENTVVVSSAAVAKEVLQKHDLAFSSRSIPDAVHAHDQFKYSVVWLPVASRWRSLRKTMNSNIFSGSCLDANQHLRSRKVEELIAYCKESCRRAEAVDVGRAAFRTALNSLSNTIFSRDLADPLSDSGKEFKDVVSSIMMEAGKPNSVDYYPFLSRFDPQGIRRRTAIYFDKLINIFKGLIDERLEKRRSQYEEATDVIDILLNTIEQNPEEIDRTHIERMFLDLFLAGTDTTSSTVEWAMAEAMKNPETMKKAKAELAQVIGKGKIVQETDIPHLPYLQCIVKETLRLHPPVPFLIPRRVHEDVDILGYVVPNNSQVFVNMWAIGRDPDMWKNPLQFDPDRFHDSEVGLRGKDFELIPFGAGRRICPGLPLAMRMVPVVLGSLLNSFDWKVEGGKELEMNEKFGITLEKAQPLMAVPIALGGGSGGSTSSGSSGGWRRSSGSGKKVVEPPKLIVPKSVVEPEEIDEGKKKFTIFFGTQTGTAEGFAKALAEEAKARYEKAVIKVIDIDDYAADDEEYEEKFRKETLAFFILATYGDGEPTDNAARFYKWFVEGNDRGDWLKNLQYGVFGLGNRQYEHFNKIAKVVDEKVAEQGGKRIVPLVLGDDDQCIEDDFAAWRENVWPELDNLLRDEDDTTVSTTYTAAIPEYRVVFPDKSDSLISEANGHANGYANGNTVYDAQHPCRSNVAVRKELHTPASDRSCTHLDFDIAGTGLSYGTGDHVGVYCDNLSETVEEAERLLNLPPETYFSLHADKEDGTPLAGSSLPPPFPPCTLRTALTRYADLLNTPKKSALLALAAYASDPNEADRLKYLASPAGKDEYAQSLVANQRSLLEVMAEFPSAKPPLGVFFAAIAPRLQPRFYSISSSPRMAPSRIHVTCALVYEKTPGGRIHKGVCSTWMKNAIPLEESRDCSWAPIFVRQSNFKLPADPKVPVIMIGPGTGLAPFRGFLQERLALKEEGAELGTAVFFFGCRNRKMDYIYEDELNHFLEIGALSELLVAFSREGPTKQYVQHKMAEKASDIWRMISDGAYVYVCGDAKGMARDVHRTLHTIAQEQGSMDSTQAEGFVKNLQMTGRYLRDVWMPTLTKLYTMEEASQHNTNEDCWIVIDGKVYDVSSYVDDHPGGDDILVGATGKDATDEFEDAGHSKSARELMEKFCIGELEETTPSIPELDIVSQKQKMNDLPHKILNFTKQRKKQTT

SEQ ID NO: 693 - protein, 1265 aa, Artificial Sequence
  G8H-CPR-CYB5 engineered fusion
MDFLTIFIGPLLAIIALFYARLTISTRGKNLPPGPTPLPFIGNLHLLGHHPHKSLARLAKTYGPLMLLRLGSENTVVVSSAAVAKEVLQKHDLAFSSRSIPDAVHAHDQFKYSVVWLPVASRWRSLRKTMNSNIFSGSCLDANQHLRSRKVEELIAYCKESCRRAEAVDVGRAAFRTALNSLSNTIFSRDLADPLSDSGKEFKDVVSSIMMEAGKPNSVDYYPFLSRFDPQGIRRRTAIYFDKLINIFKGLIDERLEKRRSQYEEATDVIDILLNTIEQNPEEIDRTHIERMFLDLFLAGTDTTSSTVEWAMAEAMKNPETMKKAKAELAQVIGKGKIVQETDIPHLPYLQCIVKETLRLHPPVPFLIPRRVHEDVDILGYVVPNNSQVFVNMWAIGRDPDMWKNPLQFDPDRFHDSEVGLRGKDFELIPFGAGRRICPGLPLAMRMVPVVLGSLLNSFDWKVEGGKELEMNEKFGITLEKAQPLMAVPIALGGGSGGSTSSGSSGGWRRSSGSGKKVVEPPKLIVPKSVVEPEEIDEGKKKFTIFFGTQTGTAEGFAKALAEEAKARYEKAVIKVIDIDDYAADDEEYEEKFRKETLAFFILATYGDGEPTDNAARFYKWFVEGNDRGDWLKNLQYGVFGLGNRQYEHFNKIAKVVDEKVAEQGGKRIVPLVLGDDDQCIEDDFAAWRENVWPELDNLLRDEDDTTVSTTYTAAIPEYRVVFPDKSDSLISEANGHANGYANGNTVYDAQHPCRSNVAVRKELHTPASDRSCTHLDFDIAGTGLSYGTGDHVGVYCDNLSETVEEAERLLNLPPETYFSLHADKEDGTPLAGSSLPPPFPPCTLRTALTRYADLLNTPKKSALLALAAYASDPNEADRLKYLASPAGKDEYAQSLVANQRSLLEVMAEFPSAKPPLGVFFAAIAPRLQPRFYSISSSPRMAPSRIHVTCALVYEKTPGGRIHKGVCSTWMKNAIPLEESRDCSWAPIFVRQSNFKLPADPKVPVIMIGPGTGLAPFRGFLQERLALKEEGAELGTAVFFFGCRNRKMDYIYEDELNHFLEIGALSELLVAFSREGPTKQYVQHKMAEKASDIWRMISDGAYVYVCGDAKGMARDVHRTLHTIAQEQGSMDSTQAEGFVKNLQMTGRYLRDVWMPTLTKLYTMEEASQHNTNEDCWIVIDGKVYDVSSYVDDHPGGDDILVGATGKDATDEFEDAGHSKSARELMEKFCIGELEETTPSIPELDIVSQKQKMNDLPHKILNFTKQ

SEQ ID NO: 694 - protein, 771 aa, Artificial Sequence
  8HGO-ISY engineered fusion
MTKTNSPAPSVITCKAAVVWKSGEPPKVEEIQVDPPKASEVRIKMLCASLCHTDFLACNGLPVPLFPRIPGHEGVGMIESVGENVTNLKEGDIVMPLYLGECGECLNCKSGRTNLCHKYPLGFSGLLLDGTSRMSIGEQKVYHHFSCSTWSEYIVIEAAYAVKVDPRVSLPHASFLCCGFTTGFGATWRDVNVVKGSTVAVLGLGAVGLGAVQGAKSQGASRIIGLDINDKKREKGEAFGMTEFINPKGSNKSISELINEATGGLGLDYVYECTGVPALLNEAIESSKVGLGTAVLIGAGLETSGEIKFIPLLCGRTVKGSIYGGVRPKSDLPTLIEKCINKEIPMDELMTHEVSLSEINKGFEYLKHPDCVKVVIKFGGGSGMSWWWKRSIGAGKNLPNQNKENGVCKSYKSVALVVGVTGIVGSSLAEVLKLPDTPGGPWKVYGVARRPCPVWLAKKPVEYIQCDVSDNQETISKLSPLKDITHIFYVSWIGSEDCQTNATMFKNILNSVIPNASNLQHVCLQTGIKHYFGIFEEGSKVVPHDSPFTEDLPRLNVPNFYHDLEDILYEETGKNNLTWSVHRPALVFGFSPCSMMNIVSTLCVYATICKHENKALVYPGSKNSWNCYADAVDADLVAEHEIWAAVDPKAKNQVLNCNNGDVFKWKHIWKKLAEEFGIEMVGYVEGKEQVSLAELMKDKDQVWDEIVKKNNLVPTKLKEIAAFWFADIAFCSENLISSMNKSKELGFLGFRNSMKSFVSCIDKMRDYRFIP

SEQ ID NO: 695 - protein, 779 aa, Artificial Sequence
  8HGO-ISY engineered fusion
MTKTNSPAPSVITCKAAVVWKSGEPPKVEEIQVDPPKASEVRIKMLCASLCHTDFLACNGLPVPLFPRIPGHEGVGMIESVGENVTNLKEGDIVMPLYLGECGECLNCKSGRTNLCHKYPLGFSGLLLDGTSRMSIGEQKVYHHFSCSTWSEYIVIEAAYAVKVDPRVSLPHASFLCCGFTTGFGATWRDVNVVKGSTVAVLGLGAVGLGAVQGAKSQGASRIIGLDINDKKREKGEAFGMTEFINPKGSNKSISELINEATGGLGLDYVYECTGVPALLNEAIESSKVGLGTAVLIGAGLETSGEIKFIPLLCGRTVKGSIYGGVRPKSDLPTLIEKCINKEIPMDELMTHEVSLSEINKGFEYLKHPDCVKVVIKFGGGSGMSLSWWRAGAAKKRMDDDESLLVKQQQQQCVALIVGVTGLVGNSLAEMLPLPDTPGGPWKVYGVARRARPSWNEDQPMTYISCDVSNTGEVEAKLSPLSDVTHIFYATWTSRSTEEENCEANGKMLKNVLDAMIPNCPNLKHICLQTGRFHYVASVVDWKINGSHDTPLTEDLPRLKTNNFYYTQEDILLEEVKRKEGLTWSVHRPGTIFGFSPYSMMNLVGTLCVYAAICKQEGAVLRFPGCKGAWDGHSDCADADLIAEQQIWAALDPHAKNQAFNVSNGDLFKWKHLWKVLADQFGVECGDYEEGQQLRLQDVMKDKGPVWDKIVAENGLSNTKLEDVGKWWFSDTILWNECRLDSMNKSKEHGFLGFRNSKNCFLYWIHKVKAYNLVPSTYT

SEQ ID NO: 696 - protein, 776 aa, Artificial Sequence
  8HGO-ISY engineered fusion
MTKTNSPAPSVITCKAAVVWKSGEPPKVEEIQVDPPKASEVRIKMLCASLCHTDFLACNGLPVPLFPRIPGHEGVGMIESVGENVTNLKEGDIVMPLYLGECGECLNCKSGRTNLCHKYPLGFSGLLLDGTSRMSIGEQKVYHHFSCSTWSEYIVIEAAYAVKVDPRVSLPHASFLCCGFTTGFGATWRDVNVVKGSTVAVLGLGAVGLGAVQGAKSQGASRIIGLDINDKKREKGEAFGMTEFINPKGSNKSISELINEATGGLGLDYVYECTGVPALLNEAIESSKVGLGTAVLIGAGLETSGEIKFIPLLCGRTVKGSIYGGVRPKSDLPTLIEKCINKEIPMDELMTHEVSLSEINKGFEYLKHPDCVKVVIKFGGGGSGGGGSMSWWWKRSIGAGKNLPNQNKENGVCKSYKSVALVVGVTGIVGSSLAEVLKLPDTPGGPWKVYGVARRPCPVWLAKKPVEYIQCDVSDNQETISKLSPLKDITHIFYVSWIGSEDCQTNATMFKNILNSVIPNASNLQHVCLQTGIKHYFGIFEEGSKVVPHDSPFTEDLPRLNVPNFYHDLEDILYEETGKNNLTWSVHRPALVFGFSPCSMMNIVSTLCVYATICKHENKALVYPGSKNSWNCYADAVDADLVAEHEIWAAVDPKAKNQVLNCNNGDVFKWKHIWKKLAEEFGIEMVGYVEGKEQVSLAELMKDKDQVWDEIVKKNNLVPTKLKEIAAFWFADIAFCSENLISSMNKSKELGFLGFRNSMKSFVSCIDKMRDYRFIP

SEQ ID NO: 697 - protein, 784 aa, Artificial Sequence
  8HGO-ISY engineered fusion
MTKTNSPAPSVITCKAAVVWKSGEPPKVEEIQVDPPKASEVRIKMLCASLCHTDFLACNGLPVPLFPRIPGHEGVGMIESVGENVTNLKEGDIVMPLYLGECGECLNCKSGRTNLCHKYPLGFSGLLLDGTSRMSIGEQKVYHHFSCSTWSEYIVIEAAYAVKVDPRVSLPHASFLCCGFTTGFGATWRDVNVVKGSTVAVLGLGAVGLGAVQGAKSQGASRIIGLDINDKKREKGEAFGMTEFINPKGSNKSISELINEATGGLGLDYVYECTGVPALLNEAIESSKVGLGTAVLIGAGLETSGEIKFIPLLCGRTVKGSIYGGVRPKSDLPTLIEKCINKEIPMDELMTHEVSLSEINKGFEYLKHPDCVKVVIKFGGGGSGGGGSMSLSWWRAGAAKKRMDDDESLLVKQQQQQCVALIVGVTGLVGNSLAEMLPLPDTPGGPWKVYGVARRARPSWNEDQPMTYISCDVSNTGEVEAKLSPLSDVTHIFYATWTSRSTEEENCEANGKMLKNVLDAMIPNCPNLKHICLQTGRFHYVASVVDWKINGSHDTPLTEDLPRLKTNNFYYTQEDILLEEVKRKEGLTWSVHRPGTIFGFSPYSMMNLVGTLCVYAAICKQEGAVLRFPGCKGAWDGHSDCADADLIAEQQIWAALDPHAKNQAFNVSNGDLFKWKHLWKVLADQFGVECGDYEEGQQLRLQDVMKDKGPVWDKIVAENGLSNTKLEDVGKWWFSDTILWNECRLDSMNKSKEHGFLGFRNSKNCFLYWIHKVKAYNLVPSTYT

SEQ ID NO: 698 - protein, 781 aa, Artificial Sequence
  8HGO-ISY engineered fusion
MTKTNSPAPSVITCKAAVVWKSGEPPKVEEIQVDPPKASEVRIKMLCASLCHTDFLACNGLPVPLFPRIPGHEGVGMIESVGENVTNLKEGDIVMPLYLGECGECLNCKSGRTNLCHKYPLGFSGLLLDGTSRMSIGEQKVYHHFSCSTWSEYIVIEAAYAVKVDPRVSLPHASFLCCGFTTGFGATWRDVNVVKGSTVAVLGLGAVGLGAVQGAKSQGASRIIGLDINDKKREKGEAFGMTEFINPKGSNKSISELINEATGGLGLDYVYECTGVPALLNEAIESSKVGLGTAVLIGAGLETSGEIKFIPLLCGRTVKGSIYGGVRPKSDLPTLIEKCINKEIPMDELMTHEVSLSEINKGFEYLKHPDCVKVVIKFGGGGSGGGGSGGGGSMSWWWKRSIGAGKNLPNQNKENGVCKSYKSVALVVGVTGIVGSSLAEVLKLPDTPGGPWKVYGVARRPCPVWLAKKPVEYIQCDVSDNQETISKLSPLKDITHIFYVSWIGSEDCQTNATMFKNILNSVIPNASNLQHVCLQTGIKHYFGIFEEGSKVVPHDSPFTEDLPRLNVPNFYHDLEDILYEETGKNNLTWSVHRPALVFGFSPCSMMNIVSTLCVYATICKHENKALVYPGSKNSWNCYADAVDADLVAEHEIWAAVDPKAKNQVLNCNNGDVFKWKHIWKKLAEEFGIEMVGYVEGKEQVSLAELMKDKDQVWDEIVKKNNLVPTKLKEIAAFWFADIAFCSENLISSMNKSKELGFLGFRNSMKSFVSCIDKMRDYRFIP

SEQ ID NO: 699 - protein, 789 aa, Artificial Sequence
  8HGO-ISY engineered fusion
MTKTNSPAPSVITCKAAVVWKSGEPPKVEEIQVDPPKASEVRIKMLCASLCHTDFLACNGLPVPLFPRIPGHEGVGMIESVGENVTNLKEGDIVMPLYLGECGECLNCKSGRTNLCHKYPLGFSGLLLDGTSRMSIGEQKVYHHFSCSTWSEYIVIEAAYAVKVDPRVSLPHASFLCCGFTTGFGATWRDVNVVKGSTVAVLGLGAVGLGAVQGAKSQGASRIIGLDINDKKREKGEAFGMTEFINPKGSNKSISELINEATGGLGLDYVYECTGVPALLNEAIESSKVGLGTAVLIGAGLETSGEIKFIPLLCGRTVKGSIYGGVRPKSDLPTLIEKCINKEIPMDELMTHEVSLSEINKGFEYLKHPDCVKVVIKFGGGGSGGGGSGGGGSMSLSWWRAGAAKKRMDDDESLLVKQQQQQCVALIVGVTGLVGNSLAEMLPLPDTPGGPWKVYGVARRARPSWNEDQPMTYISCDVSNTGEVEAKLSPLSDVTHIFYATWTSRSTEEENCEANGKMLKNVLDAMIPNCPNLKHICLQTGRFHYVASVVDWKINGSHDTPLTEDLPRLKTNNFYYTQEDILLEEVKRKEGLTWSVHRPGTIFGFSPYSMMNLVGTLCVYAAICKQEGAVLRFPGCKGAWDGHSDCADADLIAEQQIWAALDPHAKNQAFNVSNGDLFKWKHLWKVLADQFGVECGDYEEGQQLRLQDVMKDKGPVWDKIVAENGLSNTKLEDVGKWWFSDTILWNECRLDSMNKSKEHGFLGFRNSKNCFLYWIHKVKAYNLVPSTYT

SEQ ID NO: 700 - protein, 771 aa, Artificial Sequence
  8HGO-ISY engineered fusion
MSWWWKRSIGAGKNLPNQNKENGVCKSYKSVALVVGVTGIVGSSLAEVLKLPDTPGGPWKVYGVARRPCPVWLAKKPVEYIQCDVSDNQETISKLSPLKDITHIFYVSWIGSEDCQTNATMFKNILNSVIPNASNLQHVCLQTGIKHYFGIFEEGSKVVPHDSPFTEDLPRLNVPNFYHDLEDILYEETGKNNLTWSVHRPALVFGFSPCSMMNIVSTLCVYATICKHENKALVYPGSKNSWNCYADAVDADLVAEHEIWAAVDPKAKNQVLNCNNGDVFKWKHIWKKLAEEFGIEMVGYVEGKEQVSLAELMKDKDQVWDEIVKKNNLVPTKLKEIAAFWFADIAFCSENLISSMNKSKELGFLGFRNSMKSFVSCIDKMRDYRFIPGGGSGMTKTNSPAPSVITCKAAVVWKSGEPPKVEEIQVDPPKASEVRIKMLCASLCHTDFLACNGLPVPLFPRIPGHEGVGMIESVGENVTNLKEGDIVMPLYLGECGECLNCKSGRTNLCHKYPLGFSGLLLDGTSRMSIGEQKVYHHFSCSTWSEYIVIEAAYAVKVDPRVSLPHASFLCCGFTTGFGATWRDVNVVKGSTVAVLGLGAVGLGAVQGAKSQGASRIIGLDINDKKREKGEAFGMTEFINPKGSNKSISELINEATGGLGLDYVYECTGVPALLNEAIESSKVGLGTAVLIGAGLETSGEIKFIPLLCGRTVKGSIYGGVRPKSDLPTLIEKCINKEIPMDELMTHEVSLSEINKGFEYLKHPDCVKVVIKF

SEQ ID NO: 701 - protein, 776 aa, Artificial Sequence
  8HGO-ISY engineered fusion
MSWWWKRSIGAGKNLPNQNKENGVCKSYKSVALVVGVTGIVGSSLAEVLKLPDTPGGPWKVYGVARRPCPVWLAKKPVEYIQCDVSDNQETISKLSPLKDITHIFYVSWIGSEDCQTNATMFKNILNSVIPNASNLQHVCLQTGIKHYFGIFEEGSKVVPHDSPFTEDLPRLNVPNFYHDLEDILYEETGKNNLTWSVHRPALVFGFSPCSMMNIVSTLCVYATICKHENKALVYPGSKNSWNCYADAVDADLVAEHEIWAAVDPKAKNQVLNCNNGDVFKWKHIWKKLAEEFGIEMVGYVEGKEQVSLAELMKDKDQVWDEIVKKNNLVPTKLKEIAAFWFADIAFCSENLISSMNKSKELGFLGFRNSMKSFVSCIDKMRDYRFIPGGGGSGGGGSMTKTNSPAPSVITCKAAVVWKSGEPPKVEEIQVDPPKASEVRIKMLCASLCHTDFLACNGLPVPLFPRIPGHEGVGMIESVGENVTNLKEGDIVMPLYLGECGECLNCKSGRTNLCHKYPLGFSGLLLDGTSRMSIGEQKVYHHFSCSTWSEYIVIEAAYAVKVDPRVSLPHASFLCCGFTTGFGATWRDVNVVKGSTVAVLGLGAVGLGAVQGAKSQGASRIIGLDINDKKREKGEAFGMTEFINPKGSNKSISELINEATGGLGLDYVYECTGVPALLNEAIESSKVGLGTAVLIGAGLETSGEIKFIPLLCGRTVKGSIYGGVRPKSDLPTLIEKCINKEIPMDELMTHEVSLSEINKGFEYLKHPDCVKVVIKF

SEQ ID NO: 702 - protein, 781 aa, Artificial Sequence
  8HGO-ISY engineered fusion
MSWWWKRSIGAGKNLPNQNKENGVCKSYKSVALVVGVTGIVGSSLAEVLKLPDTPGGPWKVYGVARRPCPVWLAKKPVEYIQCDVSDNQETISKLSPLKDITHIFYVSWIGSEDCQTNATMFKNILNSVIPNASNLQHVCLQTGIKHYFGIFEEGSKVVPHDSPFTEDLPRLNVPNFYHDLEDILYEETGKNNLTWSVHRPALVFGFSPCSMMNIVSTLCVYATICKHENKALVYPGSKNSWNCYADAVDADLVAEHEIWAAVDPKAKNQVLNCNNGDVFKWKHIWKKLAEEFGIEMVGYVEGKEQVSLAELMKDKDQVWDEIVKKNNLVPTKLKEIAAFWFADIAFCSENLISSMNKSKELGFLGFRNSMKSFVSCIDKMRDYRFIPGGGGSGGGGSGGGGSMTKTNSPAPSVITCKAAVVWKSGEPPKVEEIQVDPPKASEVRIKMLCASLCHTDFLACNGLPVPLFPRIPGHEGVGMIESVGENVTNLKEGDIVMPLYLGECGECLNCKSGRTNLCHKYPLGFSGLLLDGTSRMSIGEQKVYHHFSCSTWSEYIVIEAAYAVKVDPRVSLPHASFLCCGFTTGFGATWRDVNVVKGSTVAVLGLGAVGLGAVQGAKSQGASRIIGLDINDKKREKGEAFGMTEFINPKGSNKSISELINEATGGLGLDYVYECTGVPALLNEAIESSKVGLGTAVLIGAGLETSGEIKFIPLLCGRTVKGSIYGGVRPKSDLPTLIEKCINKEIPMDELMTHEVSLSEINKGFEYLKHPDCVKVVIKF

SEQ ID NO: 703 - protein, 779 aa, Artificial Sequence
  8HGO-ISY engineered fusion
MSLSWWRAGAAKKRMDDDESLLVKQQQQQCVALIVGVTGLVGNSLAEMLPLPDTPGGPWKVYGVARRARPSWNEDQPMTYISCDVSNTGEVEAKLSPLSDVTHIFYATWTSRSTEEENCEANGKMLKNVLDAMIPNCPNLKHICLQTGRFHYVASVVDWKINGSHDTPLTEDLPRLKTNNFYYTQEDILLEEVKRKEGLTWSVHRPGTIFGFSPYSMMNLVGTLCVYAAICKQEGAVLRFPGCKGAWDGHSDCADADLIAEQQIWAALDPHAKNQAFNVSNGDLFKWKHLWKVLADQFGVECGDYEEGQQLRLQDVMKDKGPVWDKIVAENGLSNTKLEDVGKWWFSDTILWNECRLDSMNKSKEHGFLGFRNSKNCFLYWIHKVKAYNLVPSTYTGGGSGMTKTNSPAPSVITCKAAVVWKSGEPPKVEEIQVDPPKASEVRIKMLCASLCHTDFLACNGLPVPLFPRIPGHEGVGMIESVGENVTNLKEGDIVMPLYLGECGECLNCKSGRTNLCHKYPLGFSGLLLDGTSRMSIGEQKVYHHFSCSTWSEYIVIEAAYAVKVDPRVSLPHASFLCCGFTTGFGATWRDVNVVKGSTVAVLGLGAVGLGAVQGAKSQGASRIIGLDINDKKREKGEAFGMTEFINPKGSNKSISELINEATGGLGLDYVYECTGVPALLNEAIESSKVGLGTAVLIGAGLETSGEIKFIPLLCGRTVKGSIYGGVRPKSDLPTLIEKCINKEIPMDELMTHEVSLSEINKGFEYLKHPDCVKVVIKF

SEQ ID NO: 704 - protein, 784 aa, Artificial Sequence
  8HGO-ISY engineered fusion
MSLSWWRAGAAKKRMDDDESLLVKQQQQQCVALIVGVTGLVGNSLAEMLPLPDTPGGPWKVYGVARRARPSWNEDQPMTYISCDVSNTGEVEAKLSPLSDVTHIFYATWTSRSTEEENCEANGKMLKNVLDAMIPNCPNLKHICLQTGRFHYVASVVDWKINGSHDTPLTEDLPRLKTNNFYYTQEDILLEEVKRKEGLTWSVHRPGTIFGFSPYSMMNLVGTLCVYAAICKQEGAVLRFPGCKGAWDGHSDCADADLIAEQQIWAALDPHAKNQAFNVSNGDLFKWKHLWKVLADQFGVECGDYEEGQQLRLQDVMKDKGPVWDKIVAENGLSNTKLEDVGKWWFSDTILWNECRLDSMNKSKEHGFLGFRNSKNCFLYWIHKVKAYNLVPSTYTGGGGSGGGGSMTKTNSPAPSVITCKAAVVWKSGEPPKVEEIQVDPPKASEVRIKMLCASLCHTDFLACNGLPVPLFPRIPGHEGVGMIESVGENVTNLKEGDIVMPLYLGECGECLNCKSGRTNLCHKYPLGFSGLLLDGTSRMSIGEQKVYHHFSCSTWSEYIVIEAAYAVKVDPRVSLPHASFLCCGFTTGFGATWRDVNVVKGSTVAVLGLGAVGLGAVQGAKSQGASRIIGLDINDKKREKGEAFGMTEFINPKGSNKSISELINEATGGLGLDYVYECTGVPALLNEAIESSKVGLGTAVLIGAGLETSGEIKFIPLLCGRTVKGSIYGGVRPKSDLPTLIEKCINKEIPMDELMTHEVSLSEINKGFEYLKHPDCVKVVIKF

SEQ ID NO: 705 - protein, 789 aa, Artificial Sequence
  8HGO-ISY engineered fusion
MSLSWWRAGAAKKRMDDDESLLVKQQQQQCVALIVGVTGLVGNSLAEMLPLPDTPGGPWKVYGVARRARPSWNEDQPMTYISCDVSNTGEVEAKLSPLSDVTHIFYATWTSRSTEEENCEANGKMLKNVLDAMIPNCPNLKHICLQTGRFHYVASVVDWKINGSHDTPLTEDLPRLKTNNFYYTQEDILLEEVKRKEGLTWSVHRPGTIFGFSPYSMMNLVGTLCVYAAICKQEGAVLRFPGCKGAWDGHSDCADADLIAEQQIWAALDPHAKNQAFNVSNGDLFKWKHLWKVLADQFGVECGDYEEGQQLRLQDVMKDKGPVWDKIVAENGLSNTKLEDVGKWWFSDTILWNECRLDSMNKSKEHGFLGFRNSKNCFLYWIHKVKAYNLVPSTYTGGGGSGGGGSGGGGSMTKTNSPAPSVITCKAAVVWKSGEPPKVEEIQVDPPKASEVRIKMLCASLCHTDFLACNGLPVPLFPRIPGHEGVGMIESVGENVTNLKEGDIVMPLYLGECGECLNCKSGRTNLCHKYPLGFSGLLLDGTSRMSIGEQKVYHHFSCSTWSEYIVIEAAYAVKVDPRVSLPHASFLCCGFTTGFGATWRDVNVVKGSTVAVLGLGAVGLGAVQGAKSQGASRIIGLDINDKKREKGEAFGMTEFINPKGSNKSISELINEATGGLGLDYVYECTGVPALLNEAIESSKVGLGTAVLIGAGLETSGEIKFIPLLCGRTVKGSIYGGVRPKSDLPTLIEKCINKEIPMDELMTHEVSLSEINKGFEYLKHPDCVKVVIKF

SEQ ID NO: 706 - protein, 651 aa, Artificial Sequence
  ISY-NEPS engineered fusion
MSWWWKRSIGAGKNLPNQNKENGVCKSYKSVALVVGVTGIVGSSLAEVLKLPDTPGGPWKVYGVARRPCPVWLAKKPVEYIQCDVSDNQETISKLSPLKDITHIFYVSWIGSEDCQTNATMFKNILNSVIPNASNLQHVCLQTGIKHYFGIFEEGSKVVPHDSPFTEDLPRLNVPNFYHDLEDILYEETGKNNLTWSVHRPALVFGFSPCSMMNIVSTLCVYATICKHENKALVYPGSKNSWNCYADAVDADLVAEHEIWAAVDPKAKNQVLNCNNGDVFKWKHIWKKLAEEFGIEMVGYVEGKEQVSLAELMKDKDQVWDEIVKKNNLVPTKLKEIAAFWFADIAFCSENLISSMNKSKELGFLGFRNSMKSFVSCIDKMRDYRFIPGGGSGMEVMKHFVTVHGVGHGAWVYYKLKPRIEAAGHRCTAVNLAASGINEKKLEEVRSSIDYAAPLLEVLDSVPENEKVILVGHSGGGMTAAVGMEKFPNKISLAVFLNAIMPDTENRPSYVLEEYTAKTPPEAWKDCQFSAYGDPPITSLVCGPEFISSTLYHLSPIEDHALGKILVRPGSLFIEDLLKAEKFTEEGFGSVPRVYVIAAEDKTIPPEFQRWMIENNPVKEVKEIKGADHMPMFSKPDELSQCLLDIAKKHA

SEQ ID NO: 707 - protein, 656 aa, Artificial Sequence
  ISY-NEPS engineered fusion
MSWWWKRSIGAGKNLPNQNKENGVCKSYKSVALVVGVTGIVGSSLAEVLKLPDTPGGPWKVYGVARRPCPVWLAKKPVEYIQCDVSDNQETISKLSPLKDITHIFYVSWIGSEDCQTNATMFKNILNSVIPNASNLQHVCLQTGIKHYFGIFEEGSKVVPHDSPFTEDLPRLNVPNFYHDLEDILYEETGKNNLTWSVHRPALVFGFSPCSMMNIVSTLCVYATICKHENKALVYPGSKNSWNCYADAVDADLVAEHEIWAAVDPKAKNQVLNCNNGDVFKWKHIWKKLAEEFGIEMVGYVEGKEQVSLAELMKDKDQVWDEIVKKNNLVPTKLKEIAAFWFADIAFCSENLISSMNKSKELGFLGFRNSMKSFVSCIDKMRDYRFIPGGGGSGGGGSMEVMKHFVTVHGVGHGAWVYYKLKPRIEAAGHRCTAVNLAASGINEKKLEEVRSSIDYAAPLLEVLDSVPENEKVILVGHSGGGMTAAVGMEKFPNKISLAVFLNAIMPDTENRPSYVLEEYTAKTPPEAWKDCQFSAYGDPPITSLVCGPEFISSTLYHLSPIEDHALGKILVRPGSLFIEDLLKAEKFTEEGFGSVPRVYVIAAEDKTIPPEFQRWMIENNPVKEVKEIKGADHMPMFSKPDELSQCLLDIAKKHA

SEQ ID NO: 708 - protein, 661 aa, Artificial Sequence
  ISY-NEPS engineered fusion
MSWWWKRSIGAGKNLPNQNKENGVCKSYKSVALVVGVTGIVGSSLAEVLKLPDTPGGPWKVYGVARRPCPVWLAKKPVEYIQCDVSDNQETISKLSPLKDITHIFYVSWIGSEDCQTNATMFKNILNSVIPNASNLQHVCLQTGIKHYFGIFEEGSKVVPHDSPFTEDLPRLNVPNFYHDLEDILYEETGKNNLTWSVHRPALVFGFSPCSMMNIVSTLCVYATICKHENKALVYPGSKNSWNCYADAVDADLVAEHEIWAAVDPKAKNQVLNCNNGDVFKWKHIWKKLAEEFGIEMVGYVEGKEQVSLAELMKDKDQVWDEIVKKNNLVPTKLKEIAAFWFADIAFCSENLISSMNKSKELGFLGFRNSMKSFVSCIDKMRDYRFIPGGGGSGGGGSGGGGSMEVMKHFVTVHGVGHGAWVYYKLKPRIEAAGHRCTAVNLAASGINEKKLEEVRSSIDYAAPLLEVLDSVPENEKVILVGHSGGGMTAAVGMEKFPNKISLAVFLNAIMPDTENRPSYVLEEYTAKTPPEAWKDCQFSAYGDPPITSLVCGPEFISSTLYHLSPIEDHALGKILVRPGSLFIEDLLKAEKFTEEGFGSVPRVYVIAAEDKTIPPEFQRWMIENNPVKEVKEIKGADHMPMFSKPDELSQCLLDIAKKHA

SEQ ID NO: 709 - protein, 659 aa, Artificial Sequence
  ISY-NEPS engineered fusion
MSLSWWRAGAAKKRMDDDESLLVKQQQQQCVALIVGVTGLVGNSLAEMLPLPDTPGGPWKVYGVARRARPSWNEDQPMTYISCDVSNTGEVEAKLSPLSDVTHIFYATWTSRSTEEENCEANGKMLKNVLDAMIPNCPNLKHICLQTGRFHYVASVVDWKINGSHDTPLTEDLPRLKTNNFYYTQEDILLEEVKRKEGLTWSVHRPGTIFGFSPYSMMNLVGTLCVYAAICKQEGAVLRFPGCKGAWDGHSDCADADLIAEQQIWAALDPHAKNQAFNVSNGDLFKWKHLWKVLADQFGVECGDYEEGQQLRLQDVMKDKGPVWDKIVAENGLSNTKLEDVGKWWFSDTILWNECRLDSMNKSKEHGFLGFRNSKNCFLYWIHKVKAYNLVPSTYTGGGSGMEVMKHFVTVHGVGHGAWVYYKLKPRIEAAGHRCTAVNLAASGINEKKLEEVRSSIDYAAPLLEVLDSVPENEKVILVGHSGGGMTAAVGMEKFPNKISLAVFLNAIMPDTENRPSYVLEEYTAKTPPEAWKDCQFSAYGDPPITSLVCGPEFISSTLYHLSPIEDHALGKILVRPGSLFIEDLLKAEKFTEEGFGSVPRVYVIAAEDKTIPPEFQRWMIENNPVKEVKEIKGADHMPMFSKPDELSQCLLDIAKKHA

SEQ ID NO: 710 - protein, 664 aa, Artificial Sequence
  ISY-NEPS engineered fusion
MSLSWWRAGAAKKRMDDDESLLVKQQQQQCVALIVGVTGLVGNSLAEMLPLPDTPGGPWKVYGVARRARPSWNEDQPMTYISCDVSNTGEVEAKLSPLSDVTHIFYATWTSRSTEEENCEANGKMLKNVLDAMIPNCPNLKHICLQTGRFHYVASVVDWKINGSHDTPLTEDLPRLKTNNFYYTQEDILLEEVKRKEGLTWSVHRPGTIFGFSPYSMMNLVGTLCVYAAICKQEGAVLRFPGCKGAWDGHSDCADADLIAEQQIWAALDPHAKNQAFNVSNGDLFKWKHLWKVLADQFGVECGDYEEGQQLRLQDVMKDKGPVWDKIVAENGLSNTKLEDVGKWWFSDTILWNECRLDSMNKSKEHGFLGFRNSKNCFLYWIHKVKAYNLVPSTYTGGGGSGGGGSMEVMKHFVTVHGVGHGAWVYYKLKPRIEAAGHRCTAVNLAASGINEKKLEEVRSSIDYAAPLLEVLDSVPENEKVILVGHSGGGMTAAVGMEKFPNKISLAVFLNAIMPDTENRPSYVLEEYTAKTPPEAWKDCQFSAYGDPPITSLVCGPEFISSTLYHLSPIEDHALGKILVRPGSLFIEDLLKAEKFTEEGFGSVPRVYVIAAEDKTIPPEFQRWMIENNPVKEVKEIKGADHMPMFSKPDELSQCLLDIAKKHA

SEQ ID NO: 711 - protein, 669 aa, Artificial Sequence
  ISY-NEPS engineered fusion
MSLSWWRAGAAKKRMDDDESLLVKQQQQQCVALIVGVTGLVGNSLAEMLPLPDTPGGPWKVYGVARRARPSWNEDQPMTYISCDVSNTGEVEAKLSPLSDVTHIFYATWTSRSTEEENCEANGKMLKNVLDAMIPNCPNLKHICLQTGRFHYVASVVDWKINGSHDTPLTEDLPRLKTNNFYYTQEDILLEEVKRKEGLTWSVHRPGTIFGFSPYSMMNLVGTLCVYAAICKQEGAVLRFPGCKGAWDGHSDCADADLIAEQQIWAALDPHAKNQAFNVSNGDLFKWKHLWKVLADQFGVECGDYEEGQQLRLQDVMKDKGPVWDKIVAENGLSNTKLEDVGKWWFSDTILWNECRLDSMNKSKEHGFLGFRNSKNCFLYWIHKVKAYNLVPSTYTGGGGSGGGGSGGGGSMEVMKHFVTVHGVGHGAWVYYKLKPRIEAAGHRCTAVNLAASGINEKKLEEVRSSIDYAAPLLEVLDSVPENEKVILVGHSGGGMTAAVGMEKFPNKISLAVFLNAIMPDTENRPSYVLEEYTAKTPPEAWKDCQFSAYGDPPITSLVCGPEFISSTLYHLSPIEDHALGKILVRPGSLFIEDLLKAEKFTEEGFGSVPRVYVIAAEDKTIPPEFQRWMIENNPVKEVKEIKGADHMPMFSKPDELSQCLLDIAKKHA

SEQ ID NO: 712 - protein, 651 aa, Artificial Sequence
  ISY-NEPS engineered fusion
MEVMKHFVTVHGVGHGAWVYYKLKPRIEAAGHRCTAVNLAASGINEKKLEEVRSSIDYAAPLLEVLDSVPENEKVILVGHSGGGMTAAVGMEKFPNKISLAVFLNAIMPDTENRPSYVLEEYTAKTPPEAWKDCQFSAYGDPPITSLVCGPEFISSTLYHLSPIEDHALGKILVRPGSLFIEDLLKAEKFTEEGFGSVPRVYVIAAEDKTIPPEFQRWMIENNPVKEVKEIKGADHMPMFSKPDELSQCLLDIAKKHAGGGSGMSWWWKRSIGAGKNLPNQNKENGVCKSYKSVALVVGVTGIVGSSLAEVLKLPDTPGGPWKVYGVARRPCPVWLAKKPVEYIQCDVSDNQETISKLSPLKDITHIFYVSWIGSEDCQTNATMFKNILNSVIPNASNLQHVCLQTGIKHYFGIFEEGSKVVPHDSPFTEDLPRLNVPNFYHDLEDILYEETGKNNLTWSVHRPALVFGFSPCSMMNIVSTLCVYATICKHENKALVYPGSKNSWNCYADAVDADLVAEHEIWAAVDPKAKNQVLNCNNGDVFKWKHIWKKLAEEFGIEMVGYVEGKEQVSLAELMKDKDQVWDEIVKKNNLVPTKLKEIAAFWFADIAFCSENLISSMNKSKELGFLGFRNSMKSFVSCIDKMRDYRFIP

SEQ ID NO: 713 - protein, 659 aa, Artificial Sequence
  ISY-NEPS engineered fusion
MEVMKHFVTVHGVGHGAWVYYKLKPRIEAAGHRCTAVNLAASGINEKKLEEVRSSIDYAAPLLEVLDSVPENEKVILVGHSGGGMTAAVGMEKFPNKISLAVFLNAIMPDTENRPSYVLEEYTAKTPPEAWKDCQFSAYGDPPITSLVCGPEFISSTLYHLSPIEDHALGKILVRPGSLFIEDLLKAEKFTEEGFGSVPRVYVIAAEDKTIPPEFQRWMIENNPVKEVKEIKGADHMPMFSKPDELSQCLLDIAKKHAGGGSGMSLSWWRAGAAKKRMDDDESLLVKQQQQQCVALIVGVTGLVGNSLAEMLPLPDTPGGPWKVYGVARRARPSWNEDQPMTYISCDVSNTGEVEAKLSPLSDVTHIFYATWTSRSTEEENCEANGKMLKNVLDAMIPNCPNLKHICLQTGRFHYVASVVDWKINGSHDTPLTEDLPRLKTNNFYYTQEDILLEEVKRKEGLTWSVHRPGTIFGFSPYSMMNLVGTLCVYAAICKQEGAVLRFPGCKGAWDGHSDCADADLIAEQQIWAALDPHAKNQAFNVSNGDLFKWKHLWKVLADQFGVECGDYEEGQQLRLQDVMKDKGPVWDKIVAENGLSNTKLEDVGKWWFSDTILWNECRLDSMNKSKEHGFLGFRNSKNCFLYWIHKVKAYNLVPSTYT

SEQ ID NO: 714 - protein, 656 aa, Artificial Sequence
  ISY-NEPS engineered fusion
MEVMKHFVTVHGVGHGAWVYYKLKPRIEAAGHRCTAVNLAASGINEKKLEEVRSSIDYAAPLLEVLDSVPENEKVILVGHSGGGMTAAVGMEKFPNKISLAVFLNAIMPDTENRPSYVLEEYTAKTPPEAWKDCQFSAYGDPPITSLVCGPEFISSTLYHLSPIEDHALGKILVRPGSLFIEDLLKAEKFTEEGFGSVPRVYVIAAEDKTIPPEFQRWMIENNPVKEVKEIKGADHMPMFSKPDELSQCLLDIAKKHAGGGGSGGGGSMSWWWKRSIGAGKNLPNQNKENGVCKSYKSVALVVGVTGIVGSSLAEVLKLPDTPGGPWKVYGVARRPCPVWLAKKPVEYIQCDVSDNQETISKLSPLKDITHIFYVSWIGSEDCQTNATMFKNILNSVIPNASNLQHVCLQTGIKHYFGIFEEGSKVVPHDSPFTEDLPRLNVPNFYHDLEDILYEETGKNNLTWSVHRPALVFGFSPCSMMNIVSTLCVYATICKHENKALVYPGSKNSWNCYADAVDADLVAEHEIWAAVDPKAKNQVLNCNNGDVFKWKHIWKKLAEEFGIEMVGYVEGKEQVSLAELMKDKDQVWDEIVKKNNLVPTKLKEIAAFWFADIAFCSENLISSMNKSKELGFLGFRNSMKSFVSCIDKMRDYRFIP

SEQ ID NO: 715 - protein, 664 aa, Artificial Sequence
  ISY-NEPS engineered fusion
MEVMKHFVTVHGVGHGAWVYYKLKPRIEAAGHRCTAVNLAASGINEKKLEEVRSSIDYAAPLLEVLDSVPENEKVILVGHSGGGMTAAVGMEKFPNKISLAVFLNAIMPDTENRPSYVLEEYTAKTPPEAWKDCQFSAYGDPPITSLVCGPEFISSTLYHLSPIEDHALGKILVRPGSLFIEDLLKAEKFTEEGFGSVPRVYVIAAEDKTIPPEFQRWMIENNPVKEVKEIKGADHMPMFSKPDELSQCLLDIAKKHAGGGGSGGGGSMSLSWWRAGAAKKRMDDDESLLVKQQQQQCVALIVGVTGLVGNSLAEMLPLPDTPGGPWKVYGVARRARPSWNEDQPMTYISCDVSNTGEVEAKLSPLSDVTHIFYATWTSRSTEEENCEANGKMLKNVLDAMIPNCPNLKHICLQTGRFHYVASVVDWKINGSHDTPLTEDLPRLKTNNFYYTQEDILLEEVKRKEGLTWSVHRPGTIFGFSPYSMMNLVGTLCVYAAICKQEGAVLRFPGCKGAWDGHSDCADADLIAEQQIWAALDPHAKNQAFNVSNGDLFKWKHLWKVLADQFGVECGDYEEGQQLRLQDVMKDKGPVWDKIVAENGLSNTKLEDVGKWWFSDTILWNECRLDSMNKSKEHGFLGFRNSKNCFLYWIHKVKAYNLVPSTYT

SEQ ID NO: 716 - protein, 661 aa, Artificial Sequence
  ISY-NEPS engineered fusion
MEVMKHFVTVHGVGHGAWVYYKLKPRIEAAGHRCTAVNLAASGINEKKLEEVRSSIDYAAPLLEVLDSVPENEKVILVGHSGGGMTAAVGMEKFPNKISLAVFLNAIMPDTENRPSYVLEEYTAKTPPEAWKDCQFSAYGDPPITSLVCGPEFISSTLYHLSPIEDHALGKILVRPGSLFIEDLLKAEKFTEEGFGSVPRVYVIAAEDKTIPPEFQRWMIENNPVKEVKEIKGADHMPMFSKPDELSQCLLDIAKKHAGGGGSGGGGSGGGGSMSWWWKRSIGAGKNLPNQNKENGVCKSYKSVALVVGVTGIVGSSLAEVLKLPDTPGGPWKVYGVARRPCPVWLAKKPVEYIQCDVSDNQETISKLSPLKDITHIFYVSWIGSEDCQTNATMFKNILNSVIPNASNLQHVCLQTGIKHYFGIFEEGSKVVPHDSPFTEDLPRLNVPNFYHDLEDILYEETGKNNLTWSVHRPALVFGFSPCSMMNIVSTLCVYATICKHENKALVYPGSKNSWNCYADAVDADLVAEHEIWAAVDPKAKNQVLNCNNGDVFKWKHIWKKLAEEFGIEMVGYVEGKEQVSLAELMKDKDQVWDEIVKKNNLVPTKLKEIAAFWFADIAFCSENLISSMNKSKELGFLGFRNSMKSFVSCIDKMRDYRFIP

SEQ ID NO: 717 - protein, 669 aa, Artificial Sequence
  ISY-NEPS engineered fusion
MEVMKHFVTVHGVGHGAWVYYKLKPRIEAAGHRCTAVNLAASGINEKKLEEVRSSIDYAAPLLEVLDSVPENEKVILVGHSGGGMTAAVGMEKFPNKISLAVFLNAIMPDTENRPSYVLEEYTAKTPPEAWKDCQFSAYGDPPITSLVCGPEFISSTLYHLSPIEDHALGKILVRPGSLFIEDLLKAEKFTEEGFGSVPRVYVIAAEDKTIPPEFQRWMIENNPVKEVKEIKGADHMPMFSKPDELSQCLLDIAKKHAGGGGSGGGGSGGGGSMSLSWWRAGAAKKRMDDDESLLVKQQQQQCVALIVGVTGLVGNSLAEMLPLPDTPGGPWKVYGVARRARPSWNEDQPMTYISCDVSNTGEVEAKLSPLSDVTHIFYATWTSRSTEEENCEANGKMLKNVLDAMIPNCPNLKHICLQTGRFHYVASVVDWKINGSHDTPLTEDLPRLKTNNFYYTQEDILLEEVKRKEGLTWSVHRPGTIFGFSPYSMMNLVGTLCVYAAICKQEGAVLRFPGCKGAWDGHSDCADADLIAEQQIWAALDPHAKNQAFNVSNGDLFKWKHLWKVLADQFGVECGDYEEGQQLRLQDVMKDKGPVWDKIVAENGLSNTKLEDVGKWWFSDTILWNECRLDSMNKSKEHGFLGFRNSKNCFLYWIHKVKAYNLVPSTYT

SEQ ID NO: 718 - protein, 270 aa, Nepeta mussinii
MANNSVMMKKKLEGKVAIVTGGASGIGEATARLFVKYGARAVVIADIQSELGRSVAESIGKERCSFVQCDVADEEQVKSMIEWTATTYGGLDVMFSNAGVLNSAAQTVKDLDLPLFDKVMRVNTRGAAVCVKQAARKMVELGRGGSIICNAGSSAVRGAHGVTDYVMSKHAVIGLVRSASMQLGAHSIRVNSVSPMAVATPLTRNQGISTPDDVQKFLMPFISLKGVPPTAEQVAEAAAFLGSDEAAFVTGHDLPVDGGVLCMPFLLGSA

SEQ ID NO: 719 - protein, 270 aa, Nepeta mussinii; identical to SEQ ID NO: 718

SEQ ID NO: 720 - protein, 258 aa, Catharanthus roseus
MEVMKHFVTVHGVGHGAWVYYKLKPRIEAAGHRCTAVNLAASGINEKKLEEVRSSIDYAAPLLEVLDSVPENEKVILVGHSGGGMTAAVGMEKFPNKISLAVFLNAIMPDTENRPSYVLEEYTAKTPPEAWKDCQFSAYGDPPITSLVCGPEFISSTLYHLSPIEDHALGKILVRPGSLFIEDLLKAEKFTEEGFGSVPRVYVIAAEDKTIPPEFQRWMIENNPVKEVKEIKGADHMPMFSKPDELSQCLLDIAKKHA

SEQ ID NO: 721 - protein, 264 aa, Camptotheca acuminata
MEVLSKPKKHFVLTHGACHGAWVWYKVKPRIEAAGHRFTAVNLAACGVNKKQLDEVRSLYDYTLPLLEVLASIPENEKVILVGHSGGGMSAALGMEKYPEKISVAVFLNAIMPDTTHGPSYVLDQYTGGTPPEAWKDTEFITFGDPKEPLSGLVVGPKFLKTTLYPLCSDEDYTLGTLLVRPGSLFMEDLHKADKFTDEGFGSVKRVYVVCDEDKTIPAEFQRWMIENNPVKEVKEIKGADHMPMFSKQDEVCKCLLEIAEKYN

SEQ ID NO: 722 - protein, 259 aa, Vinca minor
MAALAKHFVAVHGVGHGSWVYYKLKPRIEAAGHRFTAVNLAAAGINEKKLEEVRSSVEYAAPLLEVLGSVPENEKVILIGHSGGGMTAAVGMEKFANKISLAVFLNAIMPDTKNRPSYVLEEYTAKTPPEAWKDCQFSAYGEPPITSLVCGPEFIASTLYHLSTVEDHALGSLLVRPGSLFMEDLLQAEKFTEEGFGSVPRVYVIAAEDKTIPPEFQRWMIENNPVKEVKEIKGSDHMPMFSKPDDLCKCLLEIAKQHA

SEQ ID NO: 723 - protein, 261 aa, Rauvolfia serpentina
MEVAKLQKHFVAVHGVGHGAWVYYKLKPRIEAVGHRFTAVHLAAAGINEKKLQEVRSSVEYAAPLLEVLASVPENEKVILIGHSGGGMTAAVGMEKFPNKISMAVFLNAIMPDTKNRPSYVLEEYTARTPVEAWKDCQFSAYGDPPITSLVCGPEFISSTLYHLSPVEDHALGKLLVRPGSLFIEDLLKADKFTEKGFGSVPRVYVVAAEDKTIPPEFQRWMIENSPVKEVKEIKGADHMPMFSKPDELCQCLLEIAKQHA

SEQ ID NO: 724 - protein, 258 aa, Catharanthus roseus; identical to SEQ ID NO: 720

SEQ ID NO: 725 - protein, 264 aa, Camptotheca acuminata; identical to SEQ ID NO: 721

SEQ ID NO: 726 - protein, 259 aa, Vinca minor; identical to SEQ ID NO: 722

SEQ ID NO: 727 - protein, 261 aa, Rauvolfia serpentina; identical to SEQ ID NO: 723

SEQ ID NO: 728 - protein, 268 aa, Nepeta mussinii
MGNKKTLEGKVAIVTGGASGIGETAARVFANLGARAVVIADIQSELGREVAESIGAKRCSYVQCDIGDEEQVKSMVEWTATTYGALDVMFCNAGIMSKAESAQTVLELDMSKFDEVMRVNTRGTSACVKQAARKMVELGTKGGAIVCTSSPLASRGGYIDTDYVMSKHAVMGLVRSASMQLGAHGIRVNSVSPMAVLTPLTRRMGLATPADVENAFGRFTSLKGVALTAEHVAEAAAFLASDEAAFITGHDLMVDGGLLCLPFFAPTS

SEQ ID NO: 729 - protein, 268 aa, Nepeta mussinii; identical to SEQ ID NO: 728

SEQ ID NO: 730 - protein, 258 aa, Catharanthus roseus; identical to SEQ ID NO: 720

SEQ ID NO: 731 - protein, 264 aa, Camptotheca acuminata; identical to SEQ ID NO: 721

SEQ ID NO: 732 - protein, 259 aa, Vinca minor; identical to SEQ ID NO: 722

SEQ ID NO: 733 - protein, 261 aa, Rauvolfia serpentina; identical to SEQ ID NO: 723

SEQ ID NO: 734 - protein, 261 aa, Andrographis paniculata
MVGTAAQHFVAVHGVGHGAWVYYKVKPRMEAAGVRFTPVSLAAAGNNGKKLEEVRSLHDYTTPLLEVLAAVPAGEKVVLVGHSGGGYPAAYAMEKFPEKISVAVFVNALMPDTKNRPSYVIDEYLARTPPEAWMDTQFPTYGDPPITALVVGPKFISDSLYNLSPVEDQALGHLSVRPGSLFMEDLATMDKFSDDKFGSVRRAYIVAADDKTIPAEFQRWLIENNPVAEVKEIKGADHMPMFTQPDALCKCLLEIAQKHAA

SEQ ID NO: 735 - protein, 259 aa, Gentiana triflora
MSPTKHFVAVHGVGHGAWVYYKLKPRIEAAGFKFTAIDLAAAGVNPKKLEEVNSLEEYCGPLFDVLAAVPEGEKVILVGHSGGGLSAAVGMEKFPKKISVAVFLNAIMPDTKNRPSYVMEEYTARTPIEAWKDTQFSAYGEPPITALLCGPEFISTSLYHLSPVEDHTLGKLLVRPGALFVEDLLKGAVKFTDEGFGSVPRVYVVATEDKTIPPEFQRWMIENNPVAEVKEIQGADHLPQFSKPDELTQVLVDIAKNHG

SEQ ID NO: 736 - protein, 264 aa, Coffea canephora
MEAIKEQPKHFVAVHGVGHGAWVYYKLKPRIEAAGHRFTPVDLAGAGRNEKKLEEIRTMVDYTRPLLEVLASIPENEKVILIGHSGGGMAAAVGLEKYPNKVSVGVFLNAIMPDAKNRPSYVFEEYTARTPIEKWLDTKFFPYGDPPIMALLCGPEFISNSLYNRSPKEDQALGKLLVRPGSLFMEDLLQTEKLFTEERFGSVPQAYVIASDDKTITADFQRWMIQNNPCVKEVKEIKGADHMPMFTKPDELCQCLLEIAKTYA

SEQ ID NO: 737 - protein, 262 aa, Ophiorrhiza pumila
MEATKQQQKHFVAVHGVGHGAWVYYKLKPRIEAAGHLFRAIDLSASGANDTKLEEIHSLHEYTKPLLDVLASVPENEKVILIGHSGGGMGAAVGMEKYPDKISLAIFLNAIMPDSKNPPSYVLEQYTARTPLDAWKDTKFSAYGDPPITSLLVGPEFISSTLYHLSPKEDQALGKLLVRPGSLFIEDLLKADKFSDEGFGSVPRAYVIAGDDKTIPADFQRWMIENNPVKEVKVINGADHMPMFSKPDELCQNLLELAKKHA

SEQ ID NO: 738 - protein, 254 aa, Phelline lucida
MVHFVAVHGVCHGAWVYYKLKPRVEAAGHQFTSVNLAASGVNEKKLEELHSLHDYALPLLEVLASVPENEKVILIGHSGGGMSAAVGMENYPDKILAAVFLNAIMPDSTNRPSFVLEKYTAETPLEAWKDSQFGAFGDPPITSVIAGPEFLSVLYHLSPVEDLTLGRLLVRPGSLFIEELLKSDKFSEEKFGSVKRVYVVCTEDKCIPEEFQRWMIENNPVTEVKVIEGSDHMPMFSKPDELCQSLVEIADTYA

SEQ ID NO: 739 - protein, 261 aa, Vitex agnus castus
MAGTEQKKHFVAVHGVGHGAWVYYKLKPRMEAAGYRFSPISLAAAGNNGKKLEEVRSLHDYTTPLLEVLASVPDGEKVILIGHSGGGYAAAYAMEKYPEKIAVAVFLNALMPDSKNRPSYVIDEYLKRTPPEAWMDTQFPTYGDPPITALVVGPKFISESLYNLSPIEDQALGHLSVRPGSLFMEDLATMDKFSDDKFGSVPRVYVIAAEDKTIPPEFQRWQIENNPVEEVKEIKGADHMPMFTQPDALAKCLGEIAEKYA

SEQ ID NO: 740 - protein, 260 aa, Valeriana officianalis
MTKDQKHFVAVHGVCHGAWVYYKVKPRVEAAGHKFTAVDLAASGANEKNLNDVTSMLEYTKPLLDVLAAIPDGEKVILVGHSGGGMAAALGMEKFPEKISVAVFVCAIMPDTTNTPSFVLEKYSAGTPPDAWKDCQFSAISDPPITCLSVGPEFLKAFLYTKCPVEDYTLATLLAKRPGSLYIEDLMKADKFTEKGFGSVPRVYVVCPEDDCIPAVFQKFMIENNPVVEVKEIPGADHMPMLSKPDELAKCFVEIAETYA

SEQ ID NO: 741 - protein, 255 aa, Stylidium adnatum
MVHFAAVHGVCHGSWVYYKVKPLVEAAGHKFTAIDLAASGVNEKKLEDLHSLQDYTSPLLDFLASLPKNEKVALIGHSGGGMSAAVGMEKYPDKILVAIFLNAIMPDTKNQPSFVLEQYSAGTPLDAWKDTKFGAYGDPPITSLSVGPEFISSTLYSLSPKEDFTLGTLLVRPGSLFIEDLMKAEKFTDEGFGSVKRVYIVCTKDKTIPEEFQRWMIKNNPVEEVKIIEGADHMPMFSKPAELCQCLVEIAKKYA

SEQ ID NO: 742 - protein, 260 aa, Verbena hastata
MAAAQPKHFVAVHGVGHGAWVYYKLKPRVEAAGYKFTPISLAAAGNNGKKIEEVRTLGDYTEPLLEALAAVPEGEKVILIGHSGGGCAAAYAMEKYPEKISVAVFLNAIMPDSKNKPSYVIDEYLARTPMEAWMDTQFVPLGDPPITGLLCGPKFISESLYNLSPLEDHALGNLSVRPGSLFMEDVATMEKFSDEKFGSVPRVYVIAAEDKTIKPEFQRWMIENNPVKEVKVIEGADHMPMFSKPDELCKCLVEIAEKHA

SEQ ID NO: 743 - protein, 262 aa, Byblis gigantea
MVGPTEKQKHFVAVHGVGHGAWVYYKLKPRIEAAGYRFTPVSLAAAGNNGKKLEEVRSLHDYTMPLLEVLAAVPEGEKVILIGHSGGGYAAAYGMEKYPEKISVAVFLNALMPDSKNRPSYVIDEYLKRTPPEAWLDTQFPTYGDPPITGLVVGPRFISESLYNLSPVEDQALGHLSVRPGSLFMEDLATLDKFSDEKFGSVPRVYVIAADDITIPADFQRWLIENNPVKEVKEIKGADHMPMFTQPDALCKCLVEIAEKYA

SEQ ID NO: 744 - protein, 261 aa, Unknown
  Pogostemon sp.
MVGAAQPKHFVAVHGVGHGSWVYYKLKPRVEAAGYRFSPVSLAAAGNNGKKLEEVRSLHDYTEPLLEVLAAVPDGEKVILIGHSGGGYPAAYAMEKYPDKIAVAVFLNALMPDSKNKPSYVIDEYLARTPPENWMDTQFVPFGDPPIVGLLCGPNFISQSLYNLSPIEDQALGQLSIRPGSLFMEDLATMEKFSDEKFGSVPRVYVIANEDKTIPPEFQRWQIENNPVAEVKEIKGSDHMPMFTQPDALAKCLAEIADKYA

SEQ ID NO: 745 - protein, 261 aa, Strychnos spinosa
MESAKQPKHFVAVHGVGHGAWVYYKLKPRIEAAGHRFTPVNLAASGINEQKLEEIHSLHEYTKPLLDVLASIPENEKVILIGHSGGGMSAAVGMEKYPHKISVAVFLNAIMPDSKNGASYVLEQYSARTPLDTWKDTQFSQYGDPPITALVCGPEFISTTLYHLSPVEDHALGTLLARRGSLFIEDLMKAEKFTDKGFGSVPRVYVVAAEDRTIPPEFQRWMIENNPVKEVKEIKGADHMPMFSKPDELCKCLVEIAKKHA

SEQ ID NO: 746 - protein, 256 aa, Corokia cotoneaster
MVQFVAVHGACHGAWVYYKLKPRVEAAGHKFTAVNLGASGINEKKLEELHSLYDYTLPLLEVLGSIPDGEKVVLIGHSGGGMSAALGMEKYPDKISVAVFLNAIMPDSTNRPSFVLEKYSAETPIEAWKDSKFAAYGTDPQITSVTVGPEFISSTLYHLSPVEDYTLGTLLVRPGSLFIEDLLKADKFTDGGFGSVKRVYVVCTEDRTIPEEFQRWMIKNNPVTEVKELKGADHMPMFSKPDALSQCLNEIAETYA

SEQ ID NO: 747 - protein, 258 aa, Oxera neriifolia
MAQPKQFVAVHGVGHGAWVYYKLKPRMEAAGYRFSPISLAAAGNSGKKLEEVRTLQDYTTPLLEALAAVPEDEKVVLIGHSGGGYAAACAMEKCPEKIAVAVFLNALMPDSKNRPSYVIDEYLARTPPENWMDTQFSTSGDPPIGALLCGPKFISESLYNLSPIEDQALGHLSVRPGSLFMEDLATMDKFSDEKFGSVPRVYVIAAEDKTIPPDFQRWQIENNPVAEVKEIKGADHMPMFTQPDALAKCLAEIAEKYA

SEQ ID NO: 748 - protein, 262 aa, Unknown
  Buddleja sp.
MAAAAVPPQHFVAVHGVGHGAWVYYKLKPRIEAAGHRFTPISLAAAGNSPKKLEEVRSLHDYTVPLLEVLAEVPEDEKVILIGHSGGGYAAAFGMEKYPEKIKVAVFLNALMPDSKNKPSYVIDEYLARTPPEAWMDTQFPSYGEPPITALVVGPKFISESLYNLSPIEDIALGHLSVRPGSLFMEDLATMDKFSDDKFGSVPRVYVIAAEDKTIPPDYQRWMIENNPVEEVKEIKGADHMPMFTQPDALCKCFVEIAEKYA

SEQ ID NO: 749 - protein, 258 aa, Gelsemium sempervirens
MQQKHFVAVHGACHGAWVYYKLKPRIEAAGHRLTPVNLGASGINEKKLEEIHSLDEYTAPLLEVLASIPENEKVILIGHSGGGMSAAVGMEKYPEKISVAIFLNAIMPDSKNRPSYVLEQYTARTPLDAWKDSQFSAYGDPPITSLVCGPEFISSTLYHLSPVEDHALGRLLVRPGSLFIEDLLKADKYFTDEGFGSVPRVYVVATEDRTIPPEFQRWMIENNPVKEVKEIKGADHMPMFSKPDELCQCLVEIAKKYA

SEQ ID NO: 750 - protein, 259 aa, Unknown
  Utricularia sp.
MAAVQKHFLAVHGVGHGAWVYYKLKPRMEAAGYRFSPISLAAAGNSVKKLEEVRSLHDYTTPLLEELAAVPDGEKVVLIGHSGGGIAAAYAAEQYPQKIAVAVFLNALMPDTKNRPSFVIEEYMKRTPIEAWLDTQFPTYGDPPITALVVGPKFISESLYNLSPIEDQALGHLSVRPGSLFLEDMATLPNFSDDKYGSVPRVYVIAADDKTIPADFQRWQIENYPVAEVKEIKGADHMPMFTQPDALAKALSEIADKFA

SEQ ID NO: 751 - protein, 256 aa, Unknown
  Scaevola sp.
MVQFVAVHGACHGAWVYYKIKPMVEAAGHKLTAVNLAACGNSDKKLSELNSLHDYTLPLLEVLEAVPAGEKVVLIGHSGGGMSAALGMEKYPEKIAAGVFICAIMPDSINRPSFVLEKYTAGTPPEAWKDSTFGAFGSEVQITSVTVGPEFLKTNLYQLCPVEDFTLATLSVRPGSIFIEDLLRAEKFTDKGLGSVKRVYVVCPEDKCIPAEFQKWMIENNPVTEVKEIKGADHMPMFSKPAELTKCLIEIAETYA

SEQ ID NO: 752 - protein, 256 aa, Menyanthes trifoliata
MVQFVACHGACHGAWVYYKLKPLVEAAGHKFTAVNLAASGVNEKKLEEVHSLHDYTLPLLEVLADVPEGEKVILIGHSGGGMSAAVAMEKYPEKISVAVFLNAIMPDSKNRPSFVLEKYGSGTPLEAWKDSKFGAYGTDPQITTVLVGPEFIKSTLYTLCSDEDITLGNLLVRPGSLFIEPLLTAEKFTDEGFGSVKRVYIVATEDKTIPEEFQRWMIENNPVTEVKEIKGADHMPMFSKPAELFKSLVEIAETYA

SEQ ID NO: 753 - protein, 260 aa, Pinguicula caudata
MAAAQPKQFVAVHGVGHGAWVYYKLKPRVEAAGYRFTPISLAAAGNNGKKLEEVRSLHDYTEPLLEALAAVPESEKVILIGHSGGGYAAAYGMEKYPEKISVAVFLNALMPDSKNRPSYVIDEYLKRTPAEAWLDTQFLPYGDPPIISLICGPKFISESLYNLSPLEDHALGHLSVRPGSLFMEDLATLPNFSDEKFGSIPRVYVIASDDKTIPPDFQRWQIENNPVAEVKEIKGADHMPMFTQPDALTKTLVEIAEKFA

SEQ ID NO: 754 - protein, 260 aa, Psychotria ipecacuanha
MAATQQKHFVAVHGVGHGAWVYYKLKPRIEAAGHRFTPVDLAAAGVNDTKLEELHSLCDYTKPLLDVLAAVPENEKVILIGHSGGGMSAAVGMEKYPNKISLAIFLNAIMPDAKNPPSHALEQYSARTPLDAWKDTKFSAYGDPPITTLLVGPEFISTTLYHLSPKEDQALGNLLARPGSLFIEDLLKADKFTEKGFGSVPRTYVIAADDKTIPADFQRWMIENNPVKEVKEIKGADHMPMFSKPDELCLTLMELAKKYA

SEQ ID NO: 755 - protein, 259 aa, Dipsacus sativum
MPTQQKHFVAVHGVCHGSWVYYKLKPRVEAAGHQFTAVNLAASGVNEKKLEEVTSLDEYTKPLYEVLAAVPENEKVILVGHSGGGMAAALGMEKYPEKISVAVFVCAIMPDSTNSPSFVLEKYSGGTPIDAWKDSQFGVFGDPPITSITVGPNFLKSTLYTLCPVEDFTLATLMVRPGSLYIEDLMKADKFTDKGFGSVPRVYVVCPEDKTIPVEFQKWMIENNPVTEVKEIVGADHMPMMSKPDELCKCLGEIADKYA

SEQ ID NO: 756 - protein, 258 aa, Exacum affine
MAPKHFVAVHGVGHGAWVYYKLKPRIEAAGHQFTAIDLAAAGVSEKKLEEVHSLNDYVAPLLDALASVPEGEKVILVGHSGGGLSAAVGMEKYPEKISVAVFLNAIMPDTKNRPSYVMEEYNARTPLDAWKDTKFLSYGDPPLTALLCGPEFISSSLYHLSPVEDHALGKLLVRPGALFVEDLVRGDVTFTEEKFGSVPRVYIVAKEDRTIPADFQRWMIENNPVKEVKEIEGSDHLPQFTKPDELCQYLVDIANKYG

SEQ ID NO: 757 - protein, 257 aa, Chionanthus retusus
MPKAHFVAVHGVGHGAWVYYKLKPRIEAAGHRFTALNLAAAGVNEKKLEEVRSLSEYTTPLLDFLASVPENEKVILIGHSGGGMSAAVGMEKYPEKILVAVFLNAIMPDSKNSPSYVLEQYSGKTPLDAWLDTQFSAYGDPPITALTVGPKFISNSLYHLSPVEDHALGELLVRRGSLFIEDLLQADKFTDENFGSVPRVYFVATEDRTIPAEFQRWMIENNPVEEVKEIKGADHMPMFSQPDELCKCLVEVAEKYA

SEQ ID NO: 758 - protein, 255 aa, Allamanda cathartica
MKHFVAVHGAGHGAWVYYKLKPRIEAAGYRFTPVNLAASGINEKKLVEVRSLDEYTKPLLDVLASVPEDEKVILIGHSGGGMSAAVGMEKFPKKISIAVFLNAIMPDAKNRPSYVLEEYTARTPPDAWKDSQFSVYGDPPITSLICGPEFISSTLYHLSPIEDHALGNLLVRPGSLFIEDLLKAEKFTEEGFGSVPRVYVIAAEDKTIPPEFQRWMIENNPVKEVKEIKGADHMPMFSKPDELCKCLLEIAKKYA

SEQ ID NO: 759 - protein, 260 aa, Phyla dulcis
MAAAQPKHFVAVHGVGHGAWVYYKLKPRVEAAGHRFTPISLAAAGNDGKKIEEVRTLHGYTTPLLEALAAVPEGEKVILVGHSGGGYPAAYAMEKYPEKISVAVFLNALMPDSKNKPSYVIDEYLARTPMEAWMDTQFLPLGDPPITGLLCGPKFISESLYNLSPIEDQVLGHLSVRPGSLFMEDLATMEKFSDEKFGSVPRVYVIAAGDVTIKPEFQRWQIENNPVKEVKVIEGADHMPMFTKPDELCKCLVEIAEKHG

SEQ ID NO: 760 - protein, 257 aa, Ligustrum sinense
MPKAHFVAVHGVGHGAWVYYKLKPRIEAAGHKFTALNLAAAGINDRKLEEVRSLSEYTTPLLDFLAAVPENEKVILIGHSGGGMSAAVGMEKYPEKIAVAVFLNAIMPDSKNSPSYVLVQYSGKTPPDAWLDTQFSAYGDPPITALTVGPKFISNSLYHLSPVEDHALGELLVRPGSLFIEDLLQADKFTDEKFGSVPRVYIVATEDRTIPAEFQRWMIENNPVKEVKEVKGADHMPMFSQPDALCKCLVEVAEKYA

SEQ ID NO: 761 - protein, 261 aa, Pyrenacantha malvifolia
MESSKQPKHFVAVHGVCHGAWVYYKIKHLIEAAGHRFTPVSMAASGNSQKKLEEVSSLHDYTLPLLEVLGSLPENEKVILVGHSGGGMSAALGMEKFPEKISVAVFLNAIMPDTSHGPSFVLEQYTARTPLNAWKDSQFSAYGDPPITSFVVGPEFISSTLYHLSPIEDITLGKLSVRPGSLFMEDVMKADRFTEEGFGSVKRVYVVATEDKTIPPAFQRWMIMNNPVEEVKEITGADHMPMFSKPNQLCKCLLDIAEKYA

SEQ ID NO: 762 - protein, 259 aa, Sambucus canadensis
MGKDQKHFVAVHGVCHGAWVYYKVKPRVEAAGHRFTAVNLAAAGVDQTKPEDVKSLCDYTKPLLDVLESIPEGEKVILIGHSGGGMSAAVAMDKYPHKISVAVFLNAIMPDTAHPPSFVLEKYSGGTPLDAWKDTQFSQYGEPPVTALLVGPEFISSTLYHLSPVEDHTLGTLLVRPGSLFIEDLVKLENFTEKGFGSVTRVYVVATEDKTIPPEFQRWMIENNPVAEVKEVEGADHMPMFSKPDQLCKCLVEIAEKYA

SEQ ID NO: 763 - protein, 261 aa, Leonurus japonicus
MEVLSKPKHFVAVHGVGHGSWVYYKLKPRIEAAGYRFSPISLAAAGNNGKKLEEVRSLHDYTEPLLEALAAVPEGEKVVLVGHSGGGYPTAFAMEKYPEKIAVAVFVNALMPDSKNRPSYVIEEYLGRTPQENWMDTQFLSYGDPPISALLCGPKFITDSLYNLSPAEDHALGQLSVRPGSLFMEDLMTMEKFSDEKFGSVPRVYVIAAEDKTIPPEFQRWQIENNPVAEVKEIKGADHMPMFTQPDALAKCLAEIAEKYA

SEQ ID NO: 764 - protein, 259 aa, Ajuga reptans
MAGTPKQFVAVHGVGHGAWVYYKLKPRMEAAGFRFSPISLAAAGNNGKKIEEVRTLHDYTTPLLEALAAVPEDEKVILIGHSGGGYAAAYAMEKYPEKISVAVFLNALMPDSKNRPSYVIDEYLARTPPENWMDTQFPTFGDPPIGGLICGPKFISESLYNISPIEDQALGHLSVRPGSLFMEDLATMEKFSDEKFGSVPRVYVIAAEDKTIPPDFQKWQIENNPVAEVKEIKGADHMPMFTQPDALAKCLAEIAEKHA

SEQ ID NO: 765 - protein, 261 aa, Paulownia fargesii
MVGGSQPKHFVAVHGVGHGAWVYYKLKPRIEAAGYRFTPVSLAAAGNNGKKLEEVRSLHDYTTPLLEVLASVPEGEKVILIGHSGGGYPAAYGMEKYPEKISVAVFLNALMPDSKNRPSYVIDEYLARTAPEAWLDTQFPTYGDPPITALVVGPKFISESLYNLSPIEDQVLGHLSVRPGSLFMEDLATLDKFSDEKFGSVPRVYVIAAEDKTIPPDFQRWLIENNPVKEVKEIKGADHMPMFTQPDALCKCLVEIAEKHA

SEQ ID NO: 766 - protein, 263 aa, Caiophora chuquitensis
MALEKQQKHFVLTHGACHGAWVWYKVKSKIEAAGHRFTAVNLGASGVNTKKLEEVWSLKDYTEPLLEVLGSIPEDETVILVGHSGGGMSVALAMEKYPNKISVAVFLNAIMPDSTNPPSFVLDKYSGGTPPEAWKDTQFLSFGDPKKPQTGLIVGPQFLKSTLYHLCSDEDFTLGTLLVRPGSLFLEDLPTLEKFSDEGFGSVKRVYIVCDEDKTIPVEFQRWMIENSPVSVVMEINGADHMPMFSKPNEVCQSLLEIADKHA

SEQ ID NO: 767 - protein, 261 aa, Plantago maritima
MVGEVQPKQFLAIHGVGHGSWVYYKVKPRMEALGYKFTPISLAAAGNSPKKLEEVRSLHDYTTPLLEALAAVPEGEKAVLIGHSGGGYAAAYAMEKYPEKIAVAVFLNALMPDTKNRPSFVIDEYLKRTPIEEWMDTQFPTYGEPPITALICGPKFISKSLYNLSPIEDQALGHLSIRPGSLFMEDLAVLPNFTEEKFGSVPRVYFIAADDKTIKPDFQRWLIENNPVKEVKEIKGADHMPMFTQPDELTKCLAEIAEKYA

SEQ ID NO: 768 - protein, 261 aa, Antirrhinum braun
MVGEVQPKHFVAVHGVGHGAWVYYKLKPRIEAAGHKFTPISLAAAGNSNKKIEEVRTLHDYTEPLREALAAVPEGEKVILIGHSGGGYAAAFGMEKHPEKISVAVFLNALMPDSKNRPSYVIEEYLKRTPPEAWMDTQFPTFGDPPIGGLLCGPKFISESLYNLSPIEDHALGHLSIRPGSLFMEDLATMDNFSDDKFGSVPRIYVIAADDKTIPPEFQKWQIENNPVVEVKEIKGADHMPMFTKPDELCKCLVEIAEKYA

SEQ ID NO: 769 - protein, 261 aa, Cyrilla racemiflora
MGGVMQQKHFVATHGVGHGSWVYYKLKPRIEAAGHRLTPVDLAASGVNEKKLEEVLTLDEYTTPLLEVLASIPENEKVVLIGHSGGGMAAAVGMEKYPEKIAVAVFLNAIMPDSKNRPSYVLEQYSAKTPLDAWLDTQFSTYGCPSITSLLVGPKFISSSLYHLSPVEDQALGTLLMRPGSLFIEDLLKADNFTDEKFGSVPRVFVVATEDKVIPPEFQRWMIENNPVKEVKEIKGSDHMPMFSKPDELCQCLVEIAETYA

SEQ ID NO: 770 - protein, 264 aa, Hydrangea quercifolia
MEVVKQSKHFVLVHGSCHGAWCWYKIKPRLKSAGHRVTTLDLAASGINTKEVQEIYTLREYSKPLLEIMESIEEDDQKVILVGHSYGGMSLALAMDMYPHKISVAVFMAAFMPDTVHRPSHVLDKYTGGTPLEAWKDTQFLAFGDPEKPQTGLIFGPEFLKTTLYHLCSVEDFTLGTLLVRPGSLFMEDLHTLGKLTNEGFGSVTRVYIVCDEDKTIPAEFQRWMIENNPVTEVKEINGADHMPMFSKPNEVFQCLLEIATKYA

SEQ ID NO: 771 - protein, 262 aa, Cinchona pubescens
MAATNQQPKHFVAVHGVSHGAWVYYKLKPRIEATGHRFTPVDLAASGKNETKLEELHSITDYTKPLLEVLASVPENEKVVLVGHSGGGMAAAVGMEKYPHKISLAIFLNAIMPDTKNRPSYVLEQYSAKTPLDAWKDTQFFVYDDPPITAMTVGPEFISSTLYHLSPKEDHALGKLLVRPGTLFMEDLVKLDNFTDKGFGSIPRVYVIAGDDKTIPPDFQRWMIENNPVKEVKEIKGADHMPMFTKPDVLCQCLLELANKHA

SEQ ID NO: 772 - protein, 263 aa, Actinidia chinensis
MEVTKKKLHFVGTHGMCQGAWIWYKVKPRVEAAGHRFTAVDLGACGRNPKTLDEVRTLYDYTLPLLEALASIPENEKVVLVGFSGGGFSAAVAMEKYPKKIALAIFLNATMPDTTHEASYVLDQYALGISGDTWKDTQFSTYGDPNEPLTSLLVGPKFMKSTTFQHCSIEDLTLATMLVRPGSLFMEDLKKAKKFTDEGFGSVKRVCVLCEQDLCLSAEFQRWMIENNPVEEVAAIEGADHMIMFSNPEKLCEVLLEMAQKHT

SEQ ID NO: 773 - protein, 259 aa, Swertia japonica
MSSNKHFVAVHGVGHGAWVYYKLKPRIEAAGYRFTAIDLAAAGVSSKKLEDIHSLNEYCEPLFDVLSSVPENEKVILVGHSGGGLSAALGMEKYSEKISVAVFLNAIMPDTKNRPSYVMEEYTARTPIEAWKDTKFSAYGEPPITALLCGPEFISTSLYHLSPVEDHTLGKLLVRPGALFVEDLIKGEVKFTEEGFGSVPRVYVVATEDKTIPAEFQRWMIENNPVKEVKEIEGADHLPQFSKPDELSKVLVDIAKNYG

SEQ ID NO: 774 - protein, 261 aa, Sesamum indicum
MAAAAKSKHFVAVHGVGHGAWVYYKLKPRVEAAGYQFTPVSLAAAGNNGKKLEEVRSLHDYTTPLLEVLAAVPEGEKVILIGHSGGGYAAAYGMEKYPEKISVAVFLNALMPDSKNKPSYVIDEYLARTPPEAWMDTQFPTYGDPPITALVVGPKFISESLYNLSPLEDQALGHLSVRPGSLFMEDLATMDKFSDEKFGSVPRVYVIAAEDKTIPPSFQKWQIENNPVVEVKEIKGADHMPMFTQPDALCKCLVEIAEKHG

SEQ ID NO: 775 - protein, 322 aa, Isodon rubescens
MASREGEVVCVTGGSGFIGSWIVHLLLRRGYTVRATVKNLGDERETKHLEAIEGADSRLRLFQIDLLDYDSVAAAVSGAAGVFHLASPCVIDQVHDPQRELLDPAIKGTINVLTAAKALGVRRVVITSSISAMIPSSNNLADVGEDSWIDEDYCRQNGLWYPLSKALAEKAAWKFAEENGLDIVVVNPGMVVGPINPPALNSSMQLMLRVLQGNDFFEGFFMALVHVKDVALAHLLLYENTSAAGRHLCVESLSRYDDFAEKMGKLYPEYKLPRPSSKDTQHGSLKSDAALKKLKDLGLEFIPLEQMIKDSIESLRSKGYIS

SEQ ID NO: 776 - protein, 322 aa, Prunella vulgaris
MANKEGEVVCVTGASGFIGSCLVHHLINRGYTVRATVKNLADERETKHLEAIEGAHSRLHLFQIDLLDYDSIAAAVSGAAGVFHLASPCVIHRVDDPQRELLDPAIKGTVNVLKAAKNLNIRRVVVTSSISAMIASSSSLADVGEDCWIDEDFCRQNGFWYPLSKALAEKAAWRFAEENGLDIVVINPGMVVGPILPPALNSSMQLMLDVLQGKDFSEGFFMTLVHVKDVALAQILLYENTSATGRHLCVESLSRYDDFAEQMEKLYPEYKLPRFSNDHTQDESLKSNAALKKLIDLGMEFTPLKQIVKESIESLRSKGYLS

SEQ ID NO: 777 - protein, 321 aa, Agastache rugosa
MANKEGEVVCVTGGSGFIGSWLVTLLLRRGYSVRATVKNLGDERETKHLGAIEGADSRLRLFQIDLLDYDSIVAAVAGAAGVFHLASPCVIDQVRDPQRELLDPAIKGTLNVLTAAKNLDVRRVVVTSSISAMIASSNSLAETGEDCWIDEDYCRQNGLWYPLSKALAERAAWKFAEENGLDIVVVNPGMVVGPILPPALNSSMQMILRALQGKDFPEGFFMALIHVKDVALAEILLYENTSAAGRHLCAESLSRYDDFAEQMEKLYPEYKLPRFANDTQRGSLKSNAALKKLIDLGLEFTPLEQIVKDSIESLRSKGYIS

SEQ ID NO: 778 - protein, 322 aa, Melissa officinalis
MVISEEGEVVCVTGASGFIGSWLVHLLLRRGYTVRATVKNIGDERETKHLEALEGADSRLRLFQIDLLDYDSIVAAVSGAAGVFHLASPCIIDQVEDPQRELLDPAIKGTINVLTAAKNLNVRRVVVTSSISAMIASSSSLADTSEDCWIDEDYCRQNGLWYPLSKALAEKAAWQFAKESGLDIVVVHPGMVVGPIIPPALNSSMRLMLHVLQGKDFSEGFFMALVHVKDVALAEIMLYENTSAAGRHLCVESLSRYDDFAEQVAKLYPEYKLPRFLTDTQRESPKSNAASMKLVDLGMVFTPLEQIVKDSIESLRSKGYLS

SEQ ID NO: 779 - protein, 321 aa, Micromeria fruticosa
MVNKEGEVVCVTGGSGFIGSWVVNLLLRRGYTVHATVKNLGDESETKHLEALEGADSRLRLFQIDLLDYDSIVAAISGAAGVLHLASPCTIVQVEDPQRELLDPAVKGTINVLTAAKNLDVRRVVVTSSISAMIASSNNLADAGEDCWIDEDYCRQNGLWYPLSKVLAEKAAWKFAEENGLDIVVVNPGMVVGPIFPPALNSSMQLILNVLQGKDFPEGFFMALVHVKDVALALILLYENTSAAGRHLCVESLSRYDDFAKQMEKLYPEYKLPRLSNDTLLGSPKSNAASKKLIDLGLEFTPLEQTVKDSIESLRSRGYLS

SEQ ID NO: 780 - protein, 324 aa, Plectranthus caninus
MARREGEVICVTGGSGFIGSWIVHLLLHRGYTVRATVKNLGDERETKHLEAIEGADSRLRLFQIDLLDYDSIAAAVSGAAGVFHLASPCVIDQVQDPQRELLDPAIKGTINVLTAAKELGVRRVVITSSISAMIASSNNLADVAEDCWIDEDYCRQNGLWYPLSKVLAEKAAWKFAEENGLDIVAVHPGMVVGPIIPPALNSSMKLMLRVLQGDNDFSEGFFLALVHVKDVALAHLLLYENTSATGRHLCVESLSCYADFVKTMEKLYPEYKLPRPSIDTQHGSLKSDAAAALKKLIDLGMEFIPLEQIVKDSIESLRSKGYIS

SEQ ID NO: 781 - protein, 320 aa, Rosmarinus officinalis
MANKEGEVVCVTGASGFIGSWIVHLLLRRGYAVRATVKNIGDERETKHLEAIEGAASRLRLFQIDLLDYDSIAAAISGAAGVFHVASPCTIDKVEDPQRELLDPAIKGTLNVLTAAKNLDVRRVVITSSISAMIASSNSLADVDEDCWIDEDYCRQNGLWYPLSKALAEKAAWKFAEENGLDIVVVNPGMVVGPILPPALNSSMQLMVRVLQGCDFFEGFFMALVHVNDVALAHILLYENTSAAGRHLCVESLSSYDDFAELMEKLYPEYKLPRFCKDKHGSVKSDAAMKKLIDMGMEYTPMEQIVNDAIQSLRSKGYLS

SEQ ID NO: 782 - protein, 321 aa, Nepeta mussinii
MADKEGEVVCVTGGSGFIGSWLVTLLLRRGYSVRATVKNLGDERETKHLEAIEGADSRLSLFQIDLLDYDSVATAVGDAAGVFHLASPCTIDQVNDPQRELLDPAIKGTLNVLKAAKNLGVRRVVVTSSISAMIASSNSLAETGEDCWIDEDYCRQNGLWYPVSKALAEKAAWKFAEENGLDIVVVNPGMVVGPILPPALNSSMQLMLHVLQGKDFFEGFFMGLVHVKDVALAEILLYENTSASGRYLCVESLSRYDDFAKQMEKLYPEYKLPRFSNDTQHGSLKSDAALKKLRDLGIEFAPLEQIVKDSIESLRSKGYIS

SEQ ID NO: 783 - protein, 277 aa, Catharanthus roseus
MDFLATSEGQFFVAVAVSLVAVGVAYFVLSSKKPKVCLNPENFKEFKLVKKTQLSHNVASFKFALPTPTSVLGLPIGQHISCRGKDSQGEEVIKPYTPTTLDSDVGYFELVIKMYPQGRMSHHFREMQEGDYMAVKGPKGRFKYQPGQVRAFGMLAGGSGITPMFQVARAILENPNDTTKVHLIYANVTADDILLKDELEGLTKNYPDRFKVYYVLNQPPEVWNGGVGFVSKEMIQAHCPAPSSDIKILRCGPPPMNKAMAAHLEAIGYAPEMQFQF

SEQ ID NO: 784 - protein, 277 aa, Nepeta cataria
MDFLATSEGQLVVGVAVGLLAIGAAYFLFSPKKPKVCLDPENFKEFKLVKKTQLSHNVAKFRFDLPTPTSVLGLPIGQHISCRGKDSQGEEVIKPYTPTTLDSDVGYFELVIKMYPQGRMSHHFREMKEGDYMAVKGPKGRFKYQPGQVRAFGMIAGGSGITPMFQVARAILENPNDRTKVQLIYANVTYDDILLKDEIDSLAKNYPDQFQVYYVLNQPPEVWNGGVGFVSKEMIQAHCPAPASDVKILRCGPPPMNKAMAANLEALEYSPEMQFQF

SEQ ID NO: 785 - protein, 281 aa, Arabidopsis thaliana
MDTEFLRTLDRQILLGVFVAFVAVGAGAAYFLTSSKKRRVCLDPENFKEFKLVKRHQLSHNVAKFVFELPTSTSVLGLPIGQHISCRGKDGQGEDVIKPYTPTTLDSDVGRFELVIKMYPQGRMSHHFREMRVGDHLAVKGPKGRFKYQPGQFRAFGMLAGGSGITPMFQVARAILENPTDKTKVHLIYANVTYDDILLKEELEGLTTNYPEQFKIFYVLNQPPEVWDGGVGFVSKEMIQTHCPAPASDIQILRCGPPPMNKAMAANLEALGYSPEMQFQF

SEQ ID NO: 786 - protein, 277 aa, Catharanthus roseus; identical to SEQ ID NO: 783

SEQ ID NO: 787 - protein, 277 aa, Nepeta cataria; identical to SEQ ID NO: 784

SEQ ID NO: 788 - protein, 281 aa, Arabidopsis thaliana; identical to SEQ ID NO: 785

SEQ ID NO: 789 - DNA, 1056 bp, Saccharomyces cerevisiae
atggcttcagaaaaagaaattaggagagagagattcttgaacgttttccctaaattagtagaggaattgaacgcatcgcttttggcttacggtatgcctaaggaagcatgtgactggtatgcccactcattgaactacaacactccaggcggtaagttaaatagaggtttgtccgttgtggacacgtatgctattctctccaacaagaccgttgaacaattggggcaagaagaatacgaaaaggttgctattctaggttggtgcattgagttgttgcaggcttactggttggtcgccgatgatatgatggacaagtccattaccagaagaggccaaccatgttggtacaaggttcctgaagttggggaaattgccatctgggacgcattcatgttagaggctgctatctacaagcttttgaaatctcacttcagaaacgaaaaatactacatagatatcaccgaattgttccatgaagtcaccttccaaaccgaattgggccaattgatggacttaatcactgcacctgaagacaaagtcgacttgagtaagttctccctaaagaagcactccttcatagttactttcaagactgcttactattctttctacttgcctgtcgcattggctatgtacgttgccggtatcacagatgaaaaggatttgaaacaagccagagatgtcttgattccattgggtgaatatttccaaattcaagatgactacttagactgcttcggtaccccagaacagatcggtaagatcggtacagatatccaagataacaaatgttcttgggtaatcaacaaggcattagaacttgcttccgcagaacaaagaaagactttagacgaaaattacggtaagaaggactcagtcgcagaagccaaatgcaaaaagattttcaatgacttgaaaatcgaccagttataccacgaatatgaagagtctgttgccaaggatttgaaggccaagatctcccaagtcgacgagtctcgtggcttcaaagccgacgtcttaactgcgtttttgaacaaggtttacaagagaagtaaa

SEQ ID NO: 790 - DNA, 1056 bp, Saccharomyces cerevisiae
atggctagtgagaaagagattcggagggagcgattcttgaacgttttccccaaattagttgaggaattaaacgcttcccttttggcgtacggtatgccaaaagaggcgtgcgattggtacgctcattcactaaattacaacacccccggaggcaaattaaaccgtggtctgagtgtcgtggatacatatgctatcttatctaacaaaaccgtcgagcagctgggccaagaggaatacgaaaaggttgcaatactgggatggtgcatcgaactattacaagcttattggttagttgctgacgacatgatggacaagtctataacccggagagggcaaccatgttggtacaaagttccagaggtcggtgaaatcgccatttgggacgcctttatgttggaagctgctatatataagttgttgaaatctcattttaggaacgagaaatactatattgatatcactgaattatttcatgaggttacatttcaaacggaacttggacaattgatggacctgattaccgctcctgaagacaaagttgatctttcaaagttcagtctcaaaaaacattcattcatagttacattcgaaaccgcttattattctttttacttgcctgtagccctagctatgtacgtagctggcatcacggatgagaaagacttgaagcaagccagggatgttttgatacctctaggggaatactttcaaattcaggatgattatttagattgcttcggcacaccggaacagatcgggaagattggtacagacattcaagataataagtgtagttgggtaattaacaaggctttggaattggccagcgctgaacagaggaagacacttgatgaaaactacggtaaaaaagattctgtagctgaagccaagtgtaagaaaatatttaacgatttgaaaattgaacaactatatcacgaatatgaagagtctattgcgaaagatttaaaagccaaaatttctcaggttgacgaatctagaggttttaaagccgatgtgctaactgccttccttaataaagtctacaaaagatctaaa

SEQ ID NO: 791 - DNA, 888 bp, Abies grandis
atgttcgattttaataagtacatggactcaaaggcgatgaccgttaacgaagcgttaaacaaggctattcccttacgatatccacagaagatctatgaatcgatgaggtattcattattagctggaggtaaaagagtcaggccagtcttatgtattgctgcttgtgaacttgtaggtggtaccgaggaattagcaattccgactgcatgtgctatagagatgatacatacgatgagcttgatgcatgatgatcttccatgcattgataatgatgatctgcggcgtggcaaacctacaaatcataagatatttggtgaggataccgcagtcacagcaggaaatgctttgcacagttacgccttcgaacatatagccgtatcaacgagtaaaactgttggggctgatagaatactgagaatggtttcagaattaggccgcgccaccgggtctgaaggagttatgggaggacaaatggtagatattgcgtccgaaggggatccaagtatcgatttgcagacattggaatggatccatatacacaagacagccatgttgttagagtgctccgtcgtttgtggtgccataattggtggtgcttcagaaatcgtcattgaaagagcaaggcgttatgccagatgtgttggactattgtttcaggtagtggacgatattttagatgtcactaaaagtagtgatgaattgggcaagacagctggtaaggacctgatcagcgataaagcaacctacccaaaactcatgggcctggaaaaggccaaggaattttcggatgagctgctaaatagagctaagggcgaactatcctgcttcgacccagttaaagctgcacctttgttgggtttagctgactacgttgctttcagacagaac

SEQ ID NO: 792 - DNA, 1080 bp, Catharanthus roseus
atggcaaacgtaggacaacaagtgcaaagacaatctaactcagtcgctgaggaaccgttagatccattctctctggttgcagatgagctatcgattttggctaatcgactaagatctatggttgtcgctgaagtgccaaaactagcgtctgcagcagagtacttcttcaagcttggtgtagaagggaaacgttttcgtcctactgtattgttgctaatggcaacagcaattgatgcccccatttcaaggactcctccagacacttccttagacacattaagtacagaattacgtttgagacaacagaccatcgctgaaattacaaaaatgattcatgtcgcttcacttctacatgatgatgtattggacgacgctgagactcggaggggcataggctccttgaatttcgtcatgggtaacaagttggctgttttggcaggcgattttttattgtctagagcttgtgtggctttagctagcctaaaaaatactgaagtagtaagcttattagcaacagtcgtggagcatctagtcactggtgagacaatgcaaatgaccaccacttcagatcaaagatgctcgatggaatattatatgcaaaaaacatattatatgactgcttcattgatttcgaattcttgcaaggctattgcgttactggccggtcaaacttctgaggtcgctatgcttgcatacgaatacggcaaaaacctcggcttggcttttcaattaattgatgatgtcttagattttacaggtacatctgcttcgcttggtaagggttctttgtcggatattaggcacgggattgttactgcaccgattctatttgcaattgaagaattccccgaactcagagccgtcgttgacgaaggcttcgagaatccttataacgtggatttggctttacactatttgggaaaatctcgcgggatccaaagaacaagagagttggctattaaacatgccaatttggcatctgatgcaattgattctttgccagttacagatgacgaacatgtgttgagatctagaagagcattggtggagttgactcaacgtgttataacaagacggaaa

SEQ ID NO: 793 - DNA, 891 bp, Picea abies
atggaatttgatttcgataagtatatgcattctaaggcaattgccgtgaatgaagcattagataaagtaataccaccccgttatccacaaaaaatctacgaatccatgagatatagccttttggctggcggtaaaagggttagacctatactttgtatagccgcctgtgagttgatgggtggtactgaggagttagctatgccaaccgcttgtgcaattgagatgatccacacgatgagcctcatacatgatgatctaccttatattgacaatgatgacttaagacgtggcaagccaacgaaccacaaggttttcggagaggatacagctattattgcgggcgacgctttgctatctctagcatttgaacatgtagcagtatctacttcccgcactttagggactgacatcattttacgcttattgtcagagataggtcgtgccactggttctgagggagtcatgggtggtcaggtcgtcgatatcgaatccgaaggagatccttcgattgatctagaaacactagaatgggtgcacattcataaaactgcagtattgttagagtgtagtgttgtttgtggagcaattatgggaggtgcttctgaggacgacatcgaacgagcaagacgctacgcaagatgcgtaggtttactattccaagtagttgacgatatattggatgtttcccaatcttccgaagaattagggaagactgcaggtaaagacttaatatcggacaaggcgacataccccaaactcatgggtttggaaaaggccaaggaattcgctgacgagttgctaaatagaggcaagcaagaactgagctgcttcgacccaactaaagctgcccctttattcgccctagcagattacattgcatctaggcaaaat

SEQ ID NO: 794 - DNA, 891 bp, Geobacillus sp. WSUCF1
atggcccagctgtcggttgagcaatttctgaacgagcagaagcgcgcggtggaagccgccctgtcgtcctacatggcacgactacgtggacccgagacccttaagaaagctatggcttactcactggaagctggcggtaaacgaattcggccacttctccttctggcaactattcaggctctcgggaaggaccctgctataggcctgcctgtggcctgtgcaatcgagatgatccatacctatagcctaatccatgacgatcttccttcaatggataacgatgatctgcgacgtggtaaacccacaaaccacaaggtttttggcgaggccatggcaattctagccggcgatgccctgcttacttacgccttccaactgattgctgaggtcgacgatgatcgcgtgccgccctctgtccgtctccagctgatcgaacagcttgctaaggcggctggtccggaggggatggtcgccggccaagcggcagatatggaggcggaaggcaaaaccctcgccttggctgagttggagtacattcaccgacacaagaccggcaagatgctgcaatactctgtgcatgctggtgccctccttggaggcgcagatgggagacagaccagggagctgaatgagttcgcagctcaccttggacttgctttccagattcgggatgacatcctcgacattgaaggtatggaagaaaagatcggcaagcgagtcggttcggacagagacaacaagaaggccacttaccccgttctgctatcactgggtggtgcaaaagagaagctcgccttccacatcgacgctgctaagagacaccttcagcaggctaaaattgatgacgccgtcctcgcttacatttgtgaattggtcgccgtgcgggaccac

SEQ ID NO: 795 - DNA, 1056 bp, Saccharomyces cerevisiae
atggcttctgaaaaggagattcgtagagaacgatttctcaacgtttttcctaagcttgtcgaggagctaaatgcctctctcttggcctacggtatgcccaaagaggcctgcgactggtacgctcattcgctaaactacaacacacccggggggaagctaaaccgcggtctgtcggtcgttgatacctacgccatcttgtccaataagactgtcgaacagttgggacaggaggagtacgaaaaggtagctatcttgggctggtgcattgagctgttgcaggcctactttctcgtggctgacgatatgatggacaagtctattacccgaagaggacagccctgctggtacaaggtgcccgaggtcggcgagattgccattaacgatgctttcatgcttgaggctgccatttataagctgctgaagtcacactttcgaaacgaaaagtactacattgacatcaccgagctcttccatgaggtgacgttccaaaccgagctgggacaactgatggacctcataaccgcgcccgaggacaaggtggacctgtcaaaattttccctcaaaaagcacagcttcatcgttactttcggaaccgcatactattcattttatctgccggtagccctggcgatgtacgtagcgggcatcaccgacgagaaagacctgaagcaggctcgggacgtgctcatccccctcggcgagtactttcagattcaggacgattacctggactgctttggaactccagagcaaattggcaagatcggaaccgacatccaagacaacaagtgctcctgggtgatcaacaaggctctagaactggctagtgcagagcagcggaagactttggatgagaactacggcaagaaagacagcgttgctgaggccaagtgtaaaaagatctttaacgacttgaagatcgagcagctataccatgagtacgaggagtcgattgctaaagacctgaaagccaaaatcagccaggtcgatgagagccgaggtttcaaggcagacgtcctgactgcttttctgaacaaggtctacaagcgaagtaaa

SEQ ID NO: 796 - DNA, 1056 bp, Saccharomyces cerevisiae
atggccagtgagaaggagattcgacgtgaaagattcctgaacgttttcccgaaactggtcgaggaactcaacgcctccttgctcgcttatgggatgcccaaggaagcctgtgactggtacgcccactctctcaactacaatacgcccggaggtaaactgaaccgtggcttgtctgtggttgatacatacgccatcctgtctaacaagacagtcgagcagctaggccaggaggagtacgaaaaggtcgccattttgggctggtgtatcgagctcctgcaagcttacttcctggtcgccgatgatatgatggacaagtccattacccggcgaggacaaccatgttggtacaaggtgcctgaggttggcgaaattgccatcaacgatgcattcatgttggaggccgccatttacaagctgctgaaatcgcacttcagaaacgagaagtactacattgacattactgaactattccatgaggtcacatttcagaccgagcttggccagttgatggatcttattactgctccggaggacaaggtggacctgtcgaagttcagtctcaagaaacattctttcatcgtgactttcaagaccgcttattattccttttatctccctgttgcccttgcaatgtacgtcgcaggaatcacagacgaaaaggaccttaagcaggcacgagacgtgcttattccactcggcgaatactttcagatccaggacgattacctcgactgctttggcacccccgagcaaatcggcaagattggcactgatattcaggataacaagtgctcttgggtgattaacaaggccttggaattggcgtcggccgagcaacgtaagactctggatgagaactacgggaagaaggacagtgtggctgaggcaaagtgtaaaaagatcttcaacgacctgaagatcgaacagctataccacgagtacgaggagtcgattgccaaggatctgaaggcaaaaatctcacaggttgacgagtcgcgaggcttcaaagccgacgtcctcaccgccttcctcaacaaggtgtacaagcgatcgaag

SEQ ID NO: 797 - DNA, 1056 bp, Saccharomyces cerevisiae
atggcctctgagaaagagatccgacgggagcggttcctaaatgtgttccccaagttggttgaggagctaaacgcctcgctgctggcgtacggaatgcctaaagaagcttgcgactggtacgctcattccctgaactataatactcctggcggtaagctgaaccggggcctctcggtcgtcgatacttacgccattctgtcgaacaagactgtcgagcagctgggccaggaggagtatgaaaaggtcgcaatccttggatggtgcattgagttgctgcaggcgtattggctggtggctgacgatatgatggacaagagtatcacccgacggggccagccttgttggtacaaggtgccggaagtcggagaaattgcgatttgggacgcttttatgcttgaggcggcgatttacaagctcctcaagtcgcacttcagaaacgagaagtactacattgatatcactgaactctttcacgaagtcacattccagaccgagctgggccagcttatggacctgatcaccgctcccgaggacaaagtcgacctttccaaattttccctcaagaaacactctttcatcgtgacctttaagacagcgtactacagcttttatctgcccgtcgctctcgccatgtacgtggcagggatcaccgacgagaaggatctcaaacaggctcgagatgtgcttatacccctgggagagtacttccagattcaggacgactacctggactgtttcggcacccctgaacagattggcaagatcggaactgacatccaggacaataaatgcagctgggtcattaataaagctttagaactggcctccgccgaacagcggaaaactctggacgagaactacggaaagaaggattccgtcgctgaagctaaatgtaagaagattttcaacgacctgaagatcgagcagctctatcacgagtacgaggagtcaattgccaaagacctcaaggcaaagatctctcaggttgacgagtcccggggttttaaggcggatgttctgaccgctttccttaataaggtatacaagaggagtaaa

SEQ ID NO: 798 - DNA, 1041 bp, Neosartorya fumigata
atggctactacaacctcgcgagcagccttcgaggctgtctttccgactcttgccgaggacttgctggcccacgctaagaaatacaacctgcctgagaatgctgtcaagtggttcgagcaggtgctgaacgttaacgtgcccggcggtaagctgaaccgaggtctgtccgtgccagacacgggaatagccctgcttcagaagcccctgaccgatgagcagtttaagcatctgtctatcttgggatggctcactgagttgctccaagcgttttttctagtctcagacgacatgatggattcttctattacccgacgcggccagccgtgttggtatcgtcaccccggtgtcggcctgattgccattaacgacgcctttatgcttgagagcggtatctatgtcattctgaagaagcacttcagatctcacccggcttacgttgactttctggagctattccatgagaccacctggcagacagagctgggccaactgtgtgacctcataaccgcaccagaggataaggtggatctggataacttctctatggagaagtacatgttcattgtcacctacaaaacagcctattattccttctatctgcccgttgcactggcactgctgtacctggaacttgctactccagagaacctgcaacaaactcacgacattcttatccctctcggtcagtactttcaggtgcaggacgactacctcgatgcctacggcgaccccgctgtgattggaaaaattggaaccgacatccaggacaacaaatgctcctggctgattaaccaggcactgcagcgatgtaacacagagcagcgaaagctcctggacaccgcttatgggcgtaaagactcggagctggaggccaaggtcaaggcgctttacaaggagctggacctcgagaaggtttacaaggagtacgaggagaagaccgtgggggagatccggcgaaagattgcagcaatcgacgagtcgcaaggactcaaaaaggaggtgtttgaggccttcctcggcaagatttacaagcgcactaag

SEQ ID NO: 799 - DNA, 1095 bp, Catharanthus roseus
atgtgcgtgtcatcggctctcgccaacgttggacagcaagtgcagcggcagtccaattccgtcgctgaggagcctctggatcctttcagcctcgttgccgatgagctctcaatcctggctaatcggctgcgatcgatggtggttgctgaggtccccaaattggcttccgctgctgagtactttttcaagctgggtgttgaaggaaaacgtttccgcccgacagtcctcctgcttatggcgactgctattgatgctcccatctctcgaactccgcccgacacctcccttgacaccttaagcaccgagttgcgactgcgacaacagtcgatcgccgagatcacagaaatgattcacgttgcaagcctgctccacgacgacgttcttgacgatgctgaaactcgacgaggaatcggatctctcaacttcgtcatgggcaacaagctggccgttctggccggtgattttctcttgtcccgggcctgtgtggccctcgcttctctcaagaacaccgaagtcgtttcgctcctggctactgtcgtggagcatcttgtcactggagagactatgcagatgaccaccacttctgaccagcgatgttctatggagtactatatgcagaagacctattacaagaccgcctcactgatctctaactcgtgtaaagccatcgccctgctggctggtcaaacatccgaagtcgcaatgctggcctatgaatacggcaagaatctgggtctggcctttcagcttatcgacgacgtcttggattttaccggcacctctgcctcactcggcaagggttctttgtccgacatccgtcacggcattgtcacagcccccatccttttcgccatcgaagagttccccgaacttcgagcggtggtggatgagggttttgagaacccttataacgtggacctggctcttcactaccttggaaagtcgcgaggcatccagagaacgcgagagctggctattaaacacgctaacctcgcatcagacgccattgattcccttcccgttacagacgacgagcatgtcctgagatcgagacgggctttggtagagcttacacaacgagtcattaccagaagg

SEQ ID NO: 800 - DNA, 912 bp, Rhizobium acidisoli
atggacgcaaacagggacacgttcgaaacacgactcaagaacaacgctcgagaaattgaggcacttctggatgccttgctcctccctaacgccctgtccgacgagattgctcggccggagaccctccggagcgctatgcattacgccgtcttgaacggaggaaagcgcctgagaccctttctcgttgttgagtccgcggctctcctgggtggagatgacgaggctgccagacgagttggcgccgctctggaatgtgttcattgttatagtcttgtccacgatgatcttcctgccatggacgacgacgacctgcgtcgtggcaagcctaccgtccacatcaaatttgacgaagccacagctattttggccggtgacagcctcctaacctatgccttcgacattatcgccgcccctgagacagccctggccgacacgtcgaaagcttctctggtcctcgctcttgcccgagctgctggtctaggtggcatggcaggaggccaggccctcgatttggctgcggagaagcaggcccccgatgaggccggaattatcagactgcaggctatgaagaccggtgcattgatcagatttgcttgtgaggccggcgctctcatagccgcttccccccccgaagatcgtcgcagactgagagctttcggagagaagatcggcctggcctttcaactggccgatgacatcttggacctgacaagcgatactgccactatgggcaaagctaccggtaaagatgcggccagaggaaaaggaacccttgtggccctgcacggaattgagtgggcggaggagcagctgagacaacatgtccgagatgccgaggctctgctcgcgccctatggtgctcgagcttctacgctgatcgcagctgcacattttatcgcggatcgaaagtct

SEQ ID NO: 801 - DNA, 897 bp, Escherichia coli
atggactttccccaacagctcgaagcctgtgtgaaacaggctaaccaggccctgtccagatttatcgccccccttcccttccagaacactcccgtggtagagactatgcagtacggagccctgctcggcggcaagcgattgcgacccttccttgtgtacgccaccggccatatgttcggcgtttctactaacacgctcgacgccccggctgctgccgtggagtgtattcatgcttacttcctgatccacgatgatctgccagccatggatgacgatgatttgcgtcgaggcctcccgacctgccacgttaagttcggcgaggcaaacgctatcctcgctggcgacgcccttcagacacttgcattctccattctgtcagatgctgatatgcccgaggttagtgatagagatcgtatctcgatgatttctgagctggctagcgcatcgggaattgccggcatgtgcggtggtcaggctcttgatttggatgccgagggcaaacatgtcccgctggacgctttggagaggattcatagacacaagacaggtgctctcatccgcgccgccgtccgactgggcgccttgtccgctggcgacaagggtcgacgagccctcccagtcctcgataagtatgctgaatccattggcttagccttccaggtgcaggacgacattctcgacgtcgtgggcgacacggccaccctcggaaaaagacagggcgctgaccagcaactgggcaagtcgacgtaccccgcgcttctgggcctcgaacaagcccgtaagaaggctagagacctcatcgacgacgcgcgtcagtccctcaagcaactggccgagcagtctttggacactagtgctctcgaagctttggctgactacattatccaacggaacaaa

SEQ ID NO: 802 - DNA, 897 bp, Escherichia coli
atggatttccctcagcagctcgaagcctgcgtgaagcaggccaaccaggctctgtccaggtttatcgcgcccctgcccttccaaaacactcctgttgtcgagaccatgcagtacggtgctcttcttggtgggaagaggcttcgaccattcctagtgtacgccaccggtcatatgtttggagtttccaccaacactctggacgcccccgcagccgcagtggagtgcatccacgcttattccctaatccacgatgatctgcctgccatggacgacgacgacctacgtaggggcctgcccacttgtcatgtgaagttcggagaggccaacgcgatcctcgccggtgacgccctgcagactctagctttctctatcctatctgacgctgacatgcctgaagtctctgaccgcgaccgaatctccatgatttcggaactcgcttcggcctcgggaatagcaggaatgtgcggcggccaggcccttgacctcgacgctgagggtaagcatgtaccgctggatgctctcgaacggatccaccgtcacaagactggtgctcttatccgagccgccgtgagacttggcgctctcagcgccggagataagggaaggagggcgctcccggtattggacaagtacgctgagtcgatcggtctggctttccaagtgcaggatgacatcctggatgttgtgggcgacaccgccacgctcggtaagcgtcaaggagccgaccagcagctcggcaagtctacctatcctgccctcctcggacttgaacaagctcggaagaaagctcgagatctaattgatgacgcccggcagtctctaaagcagctggccgagcagtccctggacacgtctgccttggaagcccttgcggattacattatccagcggaacaag

SEQ ID NO: 803 - DNA, 912 bp, Brucella suis
atggagaaactgccagtggattttaccaccctgctgaatcgccgtgctatggaagttgaggctgccctggccggattgctggatgagtgcccccggactggagagatcgcaagaccgcaacgcctgatcgccgctatgcgacacggtgtccttaacggtggtaagagacttagacctttcctcgtgctcgagtcggcggccctcttcggccagtacggtcaggctgtcctccgggttgcagctgctttagagtgtatacattgttactcccttgtccatgacgacctgcccgctatggatgacgacgatctgcgacgaggtcagcctactgtgcataaggccttcgacgaggcggctgccattcttgcaggcgactcacttctcacatacgcctttgacatcattgcctctgatgagactgaactcgacgccacgactcgcatcaaactcgtttgtgccctgacacgagcctctggattgggcggtatggcgggaggccaggcgctcgatttgatggccgagactcgaaagcccgatgaggccggtattattactcttcaggccatgaagaccggagccctgatccgatttgcttgcgaggccggagccattattgcaggagcttctcaggaagaccgagagcgcatggccgagttcggatccgccattggtcttgctttccagctcgctgacgatttattagatgtcacagctgacgcgggtaccatgggtaaggctaccggcaaggatgctgctgccggcaaggcgacccttgtatctctccatggtatcgattggacgagacagcagctgtccggactagtggcccaggctgaatcactcttggcacctttcggcgaagatgccgagcctttgaagcaggccgcacggttcatcgctgagcgacagaac

SEQ ID NO: 804 - DNA, 1017 bp, Arabidopsis thaliana
atgttttctctcgtagccgacgagctgagtctactgtctaacaagcttcgtgaaatggtactggccgaagtgcccaagcttgcatctgcagctgagtacttttttaagagaggggtgcagggaaagcagttccgttctactattctccttctgatggccacggctcttaacgtcagggtgcctgaagccttgattggtgagagcactgacatcgtgacttccgagttgcgggtgcgacagagagggattgccgagattacagagatgatccacgtggcatccctgctgcatgacgacgtcctggacgatgctgatacgcgacggggcgtcggatccctcaacgttgtcatgggaaataagatgtcggtcctcgctggtgatttcctactttcgcgagcatgcggagcgctggcggccctcaagaacacggaggttgttgccctcctggccactgccgtcgagcaccttgtaactggagaaactatggagattacctccagcaccgagcagagatacagtatggactattacatgcagaagacctactataagacagcatctctcatcagtaacagctgtaaggcggtggccgtgttgactggccagacagctgaggtagccgtcctggcctttgaatatggtcgtaacctgggtctcgcattccaactgattgacgacattttggactttactggtacttctgccagtctaggaaagggttccctctccgacatccgacacggagtgattaccgcccctattctgttcgcgatggaggagtttccccagcttcgggaagtggtcgaccaggtagagaaggatccgcgaaacgtagatattgccctggagtacttgggaaaatctaagggaatccagcgagccagagaactagcgatggagcatgctaacttggctgcagccgccattgggagcctgccagagaccgacaacgaggacgtcaagcggtctcggcgcgcgctgatcgacctcactcatcgagttattaccagaaacaag

SEQ ID NO: 805 - DNA, 846 bp, Buchnera aphidicola
atgcacttctttcacctgtatgagcgatacaaacaccgaatcaatcaaaagcttttttacactttgaatcagctgccgtttcagaaatcgtccctgttgaaggcaatgaaatactccgtcttctcaggctctaaacgacttagatcatctctcatctactcaactggtgacgtcttcaaggtgaatattactaccctggacgtcatctccacggccatagaattcattcacagctattctttgattcacgatgacttgccctgtatggataatgacaattttcgacgaggtaagatttcttgccacgtgaagtatggcgagtcgacctctctgctcgccggagacgccctgcaatcgttggctttcaacattttaagcaactcttttatgcctaatgtgagcaacctgaagagaatcaagatgatctccgagctttcttacagcattggctcttcgggtatgtgtatgggccaaaacctggatctggaggcggagaagaaggacgtgaacctgtcagagttggagattattaacttgtacaagacttcttttctaatgcgatctgctgtgcggcttgtctactttagctccaacaacttttccaagtcgatcctgtccatcctggatctgttcagcatctcgattggcctggcctttcaaattcaagatgacatcctcgactttaagaaggatagcgtcaagaccgataacaagaaaattatcaagaagcatacttaccccttgatcatcggtcttgacgagagtcggaagaagatcaagcaattgcataagaagtccttccttgccctcaactctttgaaaaagaagatctctattcccacttac

SEQ ID NO: 806 - DNA, 1065 bp, Dendroctonus ponderosae
atgatcagaccggttcaatcatcagccctagtgacaaaggaacaatcgagagacttcatggctctctttcctgaccttgtgcgagagctgaccgaggtgggcaagtcgcaggagctcccagacgttatgcgacgattcgctcgtgttctccagtacaatacacccaccggaaagaaaaaccgtggcttgatcgtgctgtccacttacagaatgcttgaagaccccgagaagctcacccccgaaaacatccgtctagcttcaattctcggatggtgtgttgagatggtgcacgcctacttcctcatcttggacgacatcatggacggttccgaaactcgaagaggtgcattatgctggtttcgacagtcgggcatcggacttaccgctgttaacgacgctgtaatgatcgaaaacgccgtttacctgctcatcaagcgacacctaaaagaccaccccatgtacgtgcccctcatggaactgtttcacgagggcaacctgaaaaccactctaggacagtctctggacgcaatgtgtctcgacaccaacgggaagccgaagctggatatgtttacgatgagccgatacacttctatcgtaaagtacaaaactgccttttactccttccaaatgccggtagctatcgcaatgtacctggctggaatgtctgacgaggagcagcatcgacaggcaaagacaatactgatggaaatgggacagttcttccagatccaggacgatttccttgattgcttcggcgatccgaccgtaaccggcaaagtgggtactgacattcaggacggcaagtgcagttggcttgccgttgtggcgctccagcgcgcctcccctgcacagcgtaaaattatggaggaacattacggcagacctgagccagagtctattgctcgaatcaagaacctctacgtggacctgtgcctcccaaacacgtacgccatctacgaagaagagtctttcaacattatcaagacccacatccagcagatttccaaaggactgaggcacgacctcttttttaagataatggagaagatctacaaacgagagtgc

SEQ ID NO: 807 - DNA, 942 bp, Picea abies
atgaaggcgctcgtccaactggcagacctgtcagagcaggtgaagaacgtcgtcgagtttgacttcgataagtatatgcactcgaaggctatcgctgtcaacgaggccctggacaaggtaattcctccgcgataccctcagaaaatctatgaaagcatgcgatactctctgcttgcaggtggtaagcgagtccgcccgattttatgtatcgccgcctgcgagcttatgggaggcacagaggagttggctatgcccacagcctgtgcgatcgagatgattcacaccatgagcctgattcatgacgacctgccctacattgataatgacgacctccgaagaggaaaacctaccaaccacaaggtctttggagaggatactgccataattgccggcgacgcccttttgtcgctcgctttcgagcatgtcgccgtttctacctcccggactctgggtaccgatatcatccttcgtctcttgtctgaaattggacgagccacgggcagcgaaggcgtgatgggaggccaggtggtggacatcgaatcagagggcgacccctccatcgacctggagacgctggagtgggtccacatccacaagacagctgtgttgctggaatgttcggtggtgtgtggagccatcatgggtggcgcgtctgaagacgacattgagcgagcacgacgatacgctcgctgtgtcggactccttttccaggtggtggacgacatccttgacgtttcccagtcttccgaggaactcggaaagaccgccggtaaggatctcatttccgacaaagcaacgtatcccaagctgatgggactggagaaggcaaaggagtttgctgacgaactattgaaccgaggcaaacaagagctctcctgctttgatccaactaaggccgcacctctgttcgcgttggcggactacatcgcatctcgacagaac

SEQ ID NO: 808 - DNA, 900 bp, Abies grandis
atgaaggctgttgagttcgacttcaacaagtacatggactctaaggccatgacagtaaatgaggctctcaacaaggccatacctcttcggtacccccagaagatctatgagtcaatgcgctatagcctgctggctggaggcaagcgggttcgacccgttctgtgtatcgctgcttgcgagttggtcggaggcacggaggagctagctattcccactgcttgcgctattgagatgatccatacaatgtcgctgatgcatgacgacctcccctgtattgacaatgacgacctgcgacgaggaaagcctactaatcacaaaatttttggagaggacacagcggtcacagccggcaacgccctgcactcgtatgccttcgaacacattgccgtgtctaccagtaaaaccgtaggtgcggaccgtatcctccggatggtgtccgagcttggacgtgctacaggatctgagggcgttatgggaggacagatggtcgacatcgcgtctgaaggagatccttcgatcgacctacagacccttgagtggattcacatccacaagaccgctatgctcctggagtgttcagttgtgtgtggtgcgattataggtggcgcctcggagattgttatcgagagggcacggcggtacgcccggtgtgtgggactgctattccaggttgtggacgacattctcgacgttaccaaatcgtccgacgaactcggtaagaccgcgggtaaggacctgataagcgacaaggccacgtaccccaaacttatgggccttgagaaggctaaagagttctccgatgagctgcttaaccgagctaagggagagttgtcgtgcttcgaccccgtcaaggcggcccctctgcttggtctcgccgactacgttgctttccgtcaaaac

SEQ ID NO: 809 - DNA, 1113 bp, Corynebacterium glutamicum
atgaaagacgtctcgctgagctcattcgatgcccacgacctcgacttagacaagttccccgaagtcgtccgagacaggctgactcagttcctcgacgcacaagagctaacaattgctgacatcggagcccctgtcactgatgctgttgcccacttgcgctctttcgtgttgaacggaggcaaacgaatcagacccctgtacgcttgggccgggttcctcgccgcgcagggacacaagaactcatccgagaagctggagtcagtgctggacgctgcggcatcgctggagttcattcaggcgtgcgccctgattcatgacgacatcatcgactcgtctgacaccagacgtggtgccccaactgttcatagggcagtggaggctgaccatagagccaacaactttgaaggagatcctgagcactttggcgtttccgtgagcatcttggccggcgatatggccttggtctgggcggaggatatgctccaggatagtggactttccgctgaggctctggcccgaacacgcgatgcctggcgaggtatgcgaaccgaggtaattggtggccagcttctcgatatctacctggagagtcatgccaacgagtccgttgagcttgctgacagcgtgaatcgctttaagacagccgcttacacaatcgcccgtcctctgcacctgggcgcctcgatcgctggtggctcccctcaactgattgacgcccttttgcactacggacacgatatcggcatcgccttccagctgcgagacgacttgctgggcgtttttggcgaccccgccattactggaaagcccgcgggcgacgatattcgtgaaggtaagcgtacagtcctgctagctctagctcttcagcgagctgacaagcagtctcctgaagctgcgaccgcaatcagggctggtgttggcaaggtcacatcccctgaagacatcgctgtgataaccgagcacatccgcgccactggtgccgaagaggaggtggaacagcggatttcacagctgacggagtccggcctcgcccaccttgacgacgttgacattccagacgaggttcgggcccagctgagagccctggcgattcgatccacagagagacgaatg

SEQ ID NO: 810 - DNA, 1041 bp, Vitis vinifera
atgctcgctgaagagcagctggatccctttagcctggtcgctgacgaactctccctactggccgaccggctccgatcgatggtggtggcggaggtccccaaactcgcctcggccgccgagtacttctttaagatgggcgtggaaggtaagcgtttccgaccaacggtgctcctgctaatggccaccgccctgaacgttccccttcccagacccgctctcgcagaagttcccgaaaccctctcgaccgaactgcgaactcggcagcagtgtattgccgagatcaccgagatgatccacgtggcctccctgttgcatgatgatgtattggacgatgccgagactcggcggggcattggctctctgaacattatgatgggaaataaggtcgccgttcttgctggggattttctgctatcgcgtgcctgcgtggccctggcctcccttaagaacaccgaggtcgtgtccctgctcgccaccgttgttgagcatttggtcaccggcgagactatgcagatgacatccacttcggagcagagggtatccatggaatactatctccagaagacatactacaagacagcgtctctcatctccaactcatgtaaggctattgcccttctggccggacagacggctgaagtttctatgctggctttcgagtacggcaagaatcttggcctcgccttccagcttattgacgacgtccttgactttaccggcacgtcagcctctctgggcaaaggctccctgagcgacattcgacatggcatcatcacggcaccaattctgttcgccattgaggaatttcctcagcttgacgcggtcgtcaagcgaggactggataaccccgctgatatcgacttggctctcgactatctgggaaagtctcgtggtattcagcgaacacgagagctggcaatgaaacatgcaaacctcgccgccgaggcaattgatagcctgcccgagtcgggtgacgaggatgtactacggagccgtcgagccctcattgatcttacccacagggtcatcacccgtaccaag

SEQ ID NO: 811 - DNA, 957 bp, Picea abies
atgttgcgatgtagcaatacaaatgcacagctggctaacctctccgagcaggtgaagggaaaggtgactgagtttgattttaaagagtatatgcgatctaaggcaatgtccgtgaatgaagctctggatcgcgctgtgcccctacgataccccgagaagatccacgaggccatgagatattctctactggctggaggaaagcgagtccgacccatcctctgcatcgccgcctgcgaactggtcggaggctcggaggaactagctatgcccactgcttgcgcgatggagatcatccatacgatgagcctcatccacgatgacctcccacccatggataacgacgacctgcgtcgaggaaaaccaacgaaccacaaggtgttcggcgaggggaccgcggtgctggccggagatgcgcttttatcattcgctttcgagcacatcgccgtctctacctctaaaacggtggagagtgaccgagtcctcagagtcgtctcggaacttggacgtgccatcggaagtgagggcgttgcgggtggccaggtcgctgacattacttcccagggaaacccatccgtcggcctggagaccttggagtggattcatattcacaaaactgccgttttactcgagtgtagtgtggcctctggagcgatcatcggaggcgcttctgacgacgaaattgaaagggtccgcaagtacgcgcgatgcgtcggactcctgtttcaggtggttgacgacatcctcgacgtcactaagtcctccgaggagctcggaaagaccgctgccaaggacctcttgtctgacaaggccacataccccaagttgatgggcctggaaaaggctaaggagttcgccgatgaactgttgggcaaagctaaggaggagctcagtttctttaaccccactaaggcagcccccctattgggcctggcggactacatcgctcagaggcaaaac

SEQ ID NO: 812 - DNA, 957 bp, Picea abies
atgctgcgatgctccaacactaacgcccagctcgccaacctgtcagagcaggtcaagggcaaggtcactgagtttgatttcaaagagtacatgcggtctaaagctatgagtgtcaacgaggctctggatcgagccgtgcctctgcgataccctgagaagattcacgaggccatgcgatacagtctgttggctggtggcaagagggtgagacccatactgtgcattgccgcctgcgaactggttggcggatctgaggagctcgccatgccaacagcctgcgcgatggagattattcacacttactcccttatacatgacgatctccctcccatggataacgatgatctgcgacgaggtaagcccacgaaccataaggtgttcggtgaaggaaccgccgttctagccggtgatgcactgctttccttcgcctttgaacacatagccgtctctacttcgaagaccgtggagtccgacagggtgctccgagttgtcagcgagctagggcgagctattggatctgagggtgtcgctggtggacaggttgctgatattaccagccagggaaacccgtccgttggcctggagactcttgaatggatccacattcacaagacggccgtgcttctggagtgcagtgtggcgagcggcgcaatcattggcggagcctccgatgatgagatcgagcgcgtgcgaaagtatgcacgctgtgtcggtctcttgttccaagtggtggatgacattctggacgtcactaagagctcggaggaactgggcaagacagctgctaaggatttactctccgacaaggccacctacccaaagcttatgggcctcgagaaagccaaggagttcgccgacgagctcctgggaaaagcgaaggaggaactgtctttctttaaccctacaaaagcggctcccctgctcggactagccgattacattgcgcagagacagaac

SEQ ID NO: 813 - DNA, 1059 bp, Sus scrofa
atgaacggagaccagaagcttgacgcctatgcccgagagcgacaggatttcattcaacatttctcccaaattgtgaaggttctgactgaagaagatatcggacatcccgagattggcgatgccgtggccagactcaaggaggtcttggaatacaacgtcgtaggcgggaagtacaacagaggaatcactgtgctagttgtctttcgagagctcgtggagccgcgaaagcaggacgctgactcactacagagagctctcacggtgggatggtgcatcgaactgctccaggctttctttctcgtcgccgatgacattgaggactcctccctgactagacgaggtcagacatgctggtaccgaaagcccggtatcggactcgacgccattaacgatgccttcctcctcgaggcttgtatctaccgcctgctcaagttttactgccgagaacaaccgtactacttgaatctcattgagcttttccttcagacttcttacaacaccgaaatcggtcagacactggatctaattgccggtccccagggcaacgtcgatctgtcacggtttactgagaagcgatacaagtccattgttaagtacaagactgctttctactccttttatcttcctgtggctgccgccatgtacatggctggcattgacggcgagaaggagcacgctaacgcaaaaaaaatccttatggaaatgggagagttttttcagatccaagatgattaccttgatctgttcggcgatccttccgttacaggtaagatcggaaccgacattcaggataacaagtgcagttggttagtcgtgcaatgcttgcaacgtgctagcccagagcagaggcaaattctgcaagagaactacggtcagaaggacgccgagaaggtcgcccgagtcaaagctctgtatgaggagatgaacctgcaggccgtgttcctacagtacgaggaagattcgtattcccacctgatgggactcattgaacagtacgccgctcctctccccccggccattttcctcgagctagcccataagatttacaaacgacgaaag

SEQ ID NO: 814 - DNA, 1059 bp, Acyrthosiphon pisum
atgcccgttattacggggacggcggtctccaaggatgagacgcgtgacttcatggctgtgttccccgatgtcgtccgggatttgacagacaccggcagaaacctcgacgtccccgacgttacaaaatggctagcgaagctcctccagtacaacgtgcccggagggaagaagaatagaggtctcgctctcgtcctgagttataagatgctgtcctctccagcagaccagactgatgagaacatccggctgtcttacatcttgggatggtgcgtggaaattcttcaggcttatcagctagtcctagatgacattatggataacgcgattaccagaaggggccgaccttgctggtaccgacacaatgatattggcctcatggccgtcaacgatggagtgctccttgagcaatctatctatcagctcataaagaagtacttcaaggacaagccgtactacactcacattctggagttgttttacgatgtgaccatgaaaacgtcgatgggacagtgcctggacatgctgaccgccaattcttttaaatcgaaaaagctcgagaagtacaccatggagaactacactgccattgttaagtacaagactgcttactactctttttttctgcccgtctgcctagcgatgagaatgaccaacatcaacgaccccgaaatcttcagacaggccaaaaccattcttctcgagatgggccatttttttcaggtccaagatgactttttggactgctacggcgatccggacgtcatgggcaagatcggaaccgatattgaggacggaaagtgtagttggctcgccgtcgtagccctgcagaaggtcaactccgagcagaagaagattatggaagacaattatgggattgataacccggcgaatgttgcagtgatcaaagatctttacgcacaattgaaactgcccgataccttccatttatatgaggaggaatcctacaagctgatttgcacccatatccagcagctctcgcgtggactcagtcaggacatgttttttaaatttctggaaaaaatttacaagcgaactctc

SEQ ID NO: 815 - DNA, 1077 bp, Mycobacterium tuberculosis
atgcgaggcaccgacgagaagtacggactgcccccccagcctgattcggatcgaatgacccgaagaacactccctgtgctgggtctggctcacgagctcattacgcctacactgcgacagatggcggatcgtcttgacccccatatgcgaccagttgtttcataccaccttggctggtctgacgaacggggtcgccccgttaataacaactgcggtaaggccattcggcctgcgttggtttttgtggctgccgaggctgcaggagccgatccgcattccgccattcccggtgctgtctcagtggaactggtccacaactttagtctggttcacgatgatcttatggaccgagatgagcaccgacgacatagaccaaccgtctgggccctgtggggcgatgccatggcccttttggccggtgatgccatgctctcgctcgctcacgaggtcctgcttgactgtgattcccctcacgtcggagccgctctccgagccatttctgaggccacacgggagcttatccgcggacaggctgcagataccgcatttgaatcgcgaacagatgtggctttagatgagtgtctgaagatggcggagggcaagactgctgcactgatggccgcttccgccgaggtgggtgcccttttagcaggagctccccgttctgtgcgagaggccttggtcgcctacggacgccacatcgggctcgcgttccagctcgtggatgaccttctgggcatttggggccgacctgagatcactgggaaacccgtttactccgacttgcgatctcggaagaagaccctgcccgttacgtggaccgttgctcacggcggactcgccgggaggcgcttggcggcttggctggtcgatgagaccggctcgcagacagctagcgacgacgagctggccgccgtggccgagcttattgagtgcggcggagggcgacggtgggcttcggccgaagctcgccggcacgtcacccaaggcattgacatggtggctcggatcggaattccggatagaccagccgccgagttgcaggaccttgcgcactacattgtggacagacaagcc

SEQ ID NO: 816 - DNA, 879 bp, Staphylococcus aureus
atgactaacctgcccatgaataagctcattgatgaggtcaataatgagctgtccgttgccatcaacaagtccgttatggacactcagctggaggagagcatgctctactccctgaatgccggaggtaagcgtattagacctgtcctcttgctgttgacactcgacagcctaaacactgaatacgagctgggaatgaagagcgcgatagctctggagatgattcacacctattcgctgatccacgacgacctacctgcgatggacaacgacgattaccgaagaggtaaacttactaatcataaagtgtacggcgaatggacggctattctggccggcgacgctctgctgactaaggcattcgaactgatttcctcggacgaccgtctgaccgatgaggttaaaattaaagtgttgcagcgactgtctatcgcctctggccacgtcggaatggtcggaggccagatgttggatatgcaatctgaaggccagcctatcgacctcgagacgctggagatgatccataagacgaagaccggcgctctgctaacttttgccgtcatgtcggctgctgacattgccaacgtcgacgacacaaccaaggagcaccttgaaagttactcttaccatctcggcatgatgttccagatcaaggatgatctgcttgactgttacggcgacgaggcaaagctgggtaagaaggtcggttcggatcttgagaacaacaagtccacatacgtctccctgctcggcaaggacggcgcagaggacaagttgacataccatagggatgcagccgtcgacgagctcacccagattgacgagcaattcaataccaagcacctgctcgagattgtcgacctcttctactctcgtgaccat

SEQ ID NO: 817 - DNA, 891 bp, Geobacillus sp. WSUCF1
atggcccaactgtccgtcgagcagttcttgaacgaacagaagcgtgctgttgaggcagctctgagcagctacatggctcgactcaggggtccggagacattgaagaaagccatggcctattctcttgaggccggtggcaagcgcatacggcctctgctgcttctggcaactatacaggctttgggcaaagaccccgcaatcggactgcctgtggcttgtgctatcgagatgatccacacctactcgctcatacacgatgacttgccttctatggataacgacgacctgcgccggggcaaaccaaccaatcataaggtgttcggtgaggctatggcgatcttggcgggagatgcactgcttacatatgcttttcagcttatcgcagaggtcgacgacgacagagtgcccccatccgtccgactccagctcattgagcagttggccaaggcggccggtcctgagggcatggttgctggccaggccgctgacatggaagccgaggggaaaaccctcgccctagcggagctggagtacattcacagacacggaacgggaaagatgctgcaatactcggtgcatgctggtgctctgctgggtggagctgacggcagacagactcgggagcttaatgagtttgctgctcacctgggtctagcctttcagattagagacgacattttggacatcgagggcatggaagagaaaatcgggaagcgagttgggtctgatcgtgacaataagaaggcaacctaccccgtgctgctttccctgggtggagccaaggaaaagctcgcgttccatatcgacgccgctaagagacatctacagcaggccaagattgacgacgccgtgcttgcctatatctgcgaactcgtcgctgttagggatcac

SEQ ID NO: 818 - DNA, 1056 bp, Saccharomyces cerevisiae
atggcctccgagaaggagattcgccgtgagcgcttcttaaacgtcttccctaaactggtggaggaactgaacgcaagtctcctggcttacggcatgcccaaggaggcctgtgattggtacgcacacagcctgaattataacactcctggaggaaagctgaaccgcggactctcagtcgtggacacatacgctatcctgtcgaacaagaccgtcgagcaacttggccaggaggaatacgagaaggtcgccatcttaggatggtgtattgagcttctgcaggcgtatttcctagtggccgatgatatgatggataagtctatcacccgaagaggtcagccttgctggtacaaggtgcccgaggtaggagagattgcaatcaacgacgcctttatgctggaagccgcgatttacaagctcctcaagtcacacttccgaaatgagaagtactacatcgacatcaccgagctctttcacgaggtgacgttccagacggaactcggacagctgatggatctcataactgcgcctgaagacaaagtggacctgtccaaattctctctcaaaaagcattcgttcatcgttaccttcggcaccgcctactacagcttctacctgccagttgctctggctatgtacgtggccggcatcaccgacgagaaagatctcaagcaggcccgcgacgtcctaattcccctcggcgagtattttcagattcaggacgattaccttgactgcttcggaacccccgagcagatcgggaaaatcggaaccgatatccaggacaacaagtgttcttgggtcatcaacaaggccctggaactggcatctgctgagcagcggaagacacttgacgagaactacggcaaaaaggattcggttgccgaggccaagtgtaagaagatctttaatgatctgaagattgaacagctctaccatgagtacgaagagtcgatcgccaaggatctgaaggccaaaattagtcaggttgacgaaagcaggggtttcaaggcggatgtgctcaccgccttcctgaacaaggtttacaagagatctaag

SEQ ID NO: 819 - DNA, 1041 bp, Neosartorya fumigata
atggccaccacaacttcccgagccgcattcgaagctgtgttccctacccttgcagaagacctgttggcgcatgcaaaaaaatataacctgcccgagaacgctgtgaagtggtttgaacaagttcttaacgttaacgtacccggaggcaagctgaatagaggactttcagtgcccgacaccggtattgccctccttcaaaaaccccttactgacgaacagtttaagcacctgtcgatccttggctggctcactgagctactgcaagcgttcttcctggtaagcgacgacatgatggattcttccattacccggcgaggccagccttgttggtaccggcatccaggtgtaggcctgatcgccattaacgatgcatttatgctagaatctggaatttacgttatcctcaagaagcatttccgatcgcatccggcatatgttgacttcctggaactgtttcacgaaacgacctggcagacagagctcgggcagctctgtgatctgattactgcccccgaggacaaggtggatctggataacttctccatggagaagtacatgttcattgttacctacggcaccgcgtactacagcttctatttgcccgtggcactagccctcctgtatctagaactggcgacccccgagaacctgcagcagactcacgacatcctgatccccctgggacagtacttccaggtgcaggacgattatcttgatgcctacggtgacccagccgtcatcggcaagattggcaccgacatccaggacaacaaatgttcgtggctgatcaaccaggctctacagcgatgcaacaccgagcagcgaaagctcctcgacactgcctacggccgaaaggactctgagctggaggccaaggtcaaagctctgtacaaggagctggacctggagaaggtgtacaaggaatacgaagaaaagactgtgggcgagatccggcggaagattgccgcgatcgacgaatcacagggacttaagaaggaagtgttcgaggcctttctgggtaagatttataagcggaccaag

SEQ ID NO: 820 - DNA, 1041 bp, Neosartorya fumigata
atggctactaccacatcaagagcagccttcgaggccgtgttccccacccttgcggaggacctgctagcgcacgccaaaaagtacaaccttcccgagaacgccgttaagtggttcgagcaggtgctcaacgtcaacgtgccgggcggaaagctcaacagaggtctctcggtccctgataccggcatcgcgctgctccagaaacccctgacggatgagcagttcaagcaccttagcattctgggctggctaactgagttgctgcaagctttttggctcgtgtcagatgatatgatggactcctccatcacgcggcgaggacagccctgctggtaccgtcaccctggcgtgggccttatcgccatttgggacgcgtttatgttggagtcaggaatctacgtgatcctaaaaaagcacttccgatcccaccccgcttacgtggactttttggagctctttcatgagactacctggcagacagagttaggacagctgtgcgacctgattacagccccggaagacaaggtcgacctagataacttctctatggaaaagtacatgttcatcgtcacctataagaccgcttattactctttctacctgcccgtcgctctcgcactcttgtacctggagcttgcaactcctgaaaacctccagcagacgcacgacatcctgatccccctggggcagtatttccaagtccaagacgattacctcgacgcttacggagatcccgcagtcattggcaagatcggcacagatatccaggacaacaagtgctcttggctgattaaccaggccctgcagcgctgtaacaccgaacagagaaagctgttggatactgcatacggtcgtaaggactctgagttggaagcgaaggtgaaagctctgtacaaggagctggatctggagaaggtatacaaagagtacgaggagaagacggtgggcgaaatccgacgtaagattgctgctattgatgaatctcaaggtctcaagaaggaggtcttcgaagcattcctcggtaaaatttacaagcgcacaaaa

SEQ ID NO: 821 - DNA, 1095 bp, Catharanthus roseus
atgtgtgtctcatcagccctcgctaacgtcggacaacaggtgcagcgacagtccaactcggttgccgaggaacctctggatcctttcagtctagtggctgacgagctgtcaatcctggcaaaccgactgcggtccatggttgtcgctgaggttcccaaactggcctccgccgcagagtatttctttaagctgggggtcgagggcaaacgattccgaccaaccgtccttttgctcatggctacggccatcgatgcccctatcagcagaactcctcccgatacgtccttggatacactatccactgaactgagactccgtcaacagtcgatcgccgagattactgagatgattcatgtggcttccctgctgcatgacgatgtcctggacgatgctgagactagacggggcattggaagcctgaacttcgtcatgggaaacaagcttgctgtgctcgccggcgatttcttgctttccagagcttgtgttgctctcgcgagtctgaaaaacacggaggtcgtaagccttctcgcgactgtggttgagcatctggttaccggagaaaccatgcaaatgaccactacaagcgatcagagatgttccatggagtactacatgcagaagacatactacggtaccgcaagtctcatttcaaactcgtgcaaggccattgctttgcttgctggacaaacctctgaagtcgccatgctcgcttacgaatatggtaagaacctgggtctggcattccagctcattgacgacgtcctagacttcacgggaacgtccgccagcctgggtaagggttccctgtctgacatccgacatggaatcgtgaccgctcccattctctttgcgatagaggagttccccgagctgcgtgctgtggtggatgaaggattcgaaaatccctacaacgtcgacttggcccttcattacctcggaaaatctcgagggattcagcggacccgtgagctagcaatcaagcatgccaacttggcctctgatgctattgactccctgccggtcacagatgatgagcacgtgctgcgatctcggagagctctcgtcgaactgacccaacgagttattacacgacga

SEQ ID NO: 822 - DNA, 912 bp, Rhizobium acidisoli
atggacgccaaccgagacacgttcgagaccagattgaagaataacgctcgagagatcgaggctctgttggatgctcttctcctgcctaacgccctatccgacgagatcgcaagacccgaaaccctccgcagtgctatgcactacgcagtacttaacggtggtaagcgactccggcctttccttgtggttgagtcggctgccctcctgggaggagatgatgaggctgcccgaagggttggcgccgcccttgagtgcgtccattgctattccctagtccatgacgatctgccagccatggacgacgatgacctgagacgtggtaagccgaccgtgcacatcaagtttgacgaggccaccgccatactggctggtgactctttgctcacatacgcttttgacattatcgccgctcctgagactgccctcgccgatacctctaaggcatcgctggtcctggcgctcgcacgagccgcaggtctcggcggcatggcgggcggccaggcactagatctggctgcagagaagcaagcaccggacgaggcgggtattatccgactgcaggctatgggaaccggggctttaatccgattcgcctgtgaagccggcgctctcattgccgccagtccccccgaagaccggcgacgacttagggcgttcggagagaagatcggactggcctttcagctggccgacgacattctagacttgacttccgacaccgcgactatgggcaaggccacgggcaaggatgcggctcgcggcaagggtactttggtcgcactgcacggcatcgagtgggcagaggagcagttgcgacagcatgttcgagacgcggaggctctcctagctccctatggagcccgcgcgagcactctgatcgccgccgctcactttatcgctgatagaaagagc

SEQ ID NO: 823 - DNA, 897 bp, Escherichia coli
atggactttccgcaacagttagaggcttgtgtgaagcaggccaatcaagcgctctctcgcttcatcgccccccttccttttcaaaatacccctgtagtcgaaaccatgcagtacggagcactgctaggcggaaagcgactgcgcccgttcctcgtgtacgcgaccggtcatatgtttggcgtgtctacgaacaccctcgacgctccggccgctgccgttgagtgtattcatgcttacagccttatacacgatgacttgcctgctatggatgacgacgaccttagaagaggactgcctacctgtcatgtcaagttcggagaggcgaatgccatacttgccggagatgctctgcagaccctcgccttctctattttgagcgatgcagacatgcccgaggtgtcggatcgagacagaatctccatgatctcggagctcgctagtgcttcaggtatcgctggtatgtgtggtggacaggcacttgaccttgatgccgagggtaagcatgttccactggatgccctcgagcggatccacaggcataagacaggcgcactcatcagggctgccgtgcgactcggtgccctgagcgcaggtgataaggggcgccgtgctctgccggtgcttgacaagtacgccgagtcgattggtctggctttccaagttcaggacgatatcctcgatgtcgtcggcgataccgccactctgggtaaacggcagggagccgaccaacagctgggcaagtccacatatcccgcactgctggggctcgagcaagcccgaaagaaggcacgcgacctaattgacgatgcgcgacaaagtctaaagcagctggctgagcagtctttggacacgtcggccctcgaggccttggctgattacattattcagcggaacaag

SEQ ID NO: 824 - DNA, 912 bp, Brucella suis
atggagaagctccccgtggatttcacgacactgctaaaccgaagagctatggaggtcgaggctgccctcgctggtctgctcgacgaatgtcctcggacgggtgaaatcgcacgacctcagcgactgattgccgctatgcggcatggagttctgaatggaggtaaacggcttcggccttttctggtcttggagtcggccgctctcttcggccagtatggtcaggccgttctgcgcgtcgcagctgccctggagtgcattcactgctacagcttggtccacgatgatttgcccgctatggatgacgacgacctgcgaagaggacagcctactgtccataaggcttttgatgaggcagcagctatcctggccggtgattcgcttctgacgtacgctttcgacattattgcgtccgacgagaccgaactggacgccacgacgagaattaagctggtctgtgccctgaccagagcctcgggcctcggcggaatggcaggtggtcaggccttggatctgatggctgagacgcgtaagccagatgaggccggaatcattacccttcaagctatgggaaccggtgctctgattcgattcgcgtgcgaggctggagctattatcgctggcgcttcgcaggaggatcgagaacgaatggccgagtttggctctgccatcggcctcgccttccagctggccgatgacctcctcgatgtgaccgccgatgctggcaccatgggaaaggcaaccggcaaggacgccgccgccggtaaggcaacgctggtttcgctccatggaatcgactggacaagacagcagttgtctggcctcgtggcccaagccgagtccttgctcgcacccttcggagaggacgccgagcctctgaagcaggccgccagatttatcgccgaacgacagaac

SEQ ID NO: 825 - DNA, 1017 bp, Arabidopsis thaliana
atgttttccctggtggctgacgagctgagtctcttgtctaataaactgcgggaaatggtactcgccgaggtacccaaactcgcctccgctgctgagtacttctttaaacggggagtgcagggcaagcagttccgttccaccatcctactcctcatggctacagccctgaacgtgcgagtccctgaggcgctcattggtgagtcgacggatattgtcacttcagaacttcgtgtgaggcagcgaggcatcgccgaaattactgaaatgattcatgtggcttccctcttgcacgatgacgtcctcgatgatgccgacactagacggggtgtgggctccttgaacgtggttatgggaaataagatgtcagtgcttgcgggcgatttcctcctttctcgggcttgtggcgcactcgctgccctcaagaacaccgaagtggtcgctctgttggccaccgctgtggagcacctggtgacgggcgaaactatggagattacctcttctacagagcagcgttactcaatggattactatatgcaaaaaacgtactacgggaccgctagtcttatctctaactcttgcaaggctgttgccgtcctgactggtcagaccgcagaggtggctgtgcttgcctttgaatacggccgcaacctagggctggcctttcagctcatcgacgacatcctggatttcacaggcacatctgcttccctgggcaagggtagcctctccgatatccgacacggcgtcatcacggcccctattctctttgctatggaggagtttccccaactgagagaggtcgtggaccaggtggagaaggatccgagaaacgtggatattgcccttgagtacctaggtaagagcaagggaatccagcgagcccgagagctggcaatggagcacgctaacctcgctgccgctgctattggctctctgcccgagaccgataatgaggatgtgaagcgatccagacgcgcccttattgacctcacgcaccgagtaattacccgcaacaag

SEQ ID NO: 826 - DNA, 846 bp, Buchnera aphidicola
atgcacttctttcacctgtatgagaggtacaagcaccgaattaaccagaaacttttctacaccctgaaccagcttccctttcaaaaatcctccctgttgaaggcaatgaagtactctgtgttctctggctctaaacggctgcgaagctccttgatttactcgaccggtgatgtgtttaaggtcaacataaccaccctggacgtcatctctactgctattgagtttattcattcttactctctcatccacgacgatcttccctgtatggacaacgataatttccgacgaggcaaaatatcttgtcatgtcaagtacggagagtctacgtctcttctcgccggagacgcgttgcaatccctggcctttaatatcctgtcaaactccttcatgcccaacgtatcgaatctcaagcggattaagatgatctcggagctctcctactccatcggatcctccggaatgtgtatgggtcagaatctggacctcgaggccgaaaagaaggacgtcaacctgtctgagctggagattattaacctgtacggaacctctttcctgatgcgaagcgcggtccggctggtgtacttcagctccaacaacttctcgaagtctatcctttcgatcctcgacctgttttccatttccatcggtctggctttccagatccaggacgacattttggatttcaagaaggactctgtcaagaccgacaacaagaaaataattaagaagcacacatatcccctaattatcggcctggatgagtcccgaaagaagattaagcagctgcacaagaagtctttcctggccctgaacagcctgaaaaagaagattagcattcccacctac

SEQ ID NO: 827 - DNA, 1065 bp, Dendroctonus ponderosae
atgattcgacctgtgcagtcgtcggccctggtcaccaaagagcaatcccgagatttcatggctctgttccctgacctggtgcgagagttgacagaggtcggtaaaagccaagagctgcccgatgttatgcgacgatttgcccgggtcctccagtacaacacccccactggcaagaagaaccgaggcctgatcgtactgtcgacctaccgaatgctggaggacccggaaaagctcacgcctgaaaacatccgacttgcttcaatcctgggctggtgtgtggaaatggtccacgcgtactttctcattttggatgacattatggacggatctgagacccgacgaggtgcactgtgctggttcagacagtcgggcatcggactgaccgcagtgaatgatgcagttatgatcgaaaacgcggtgtacctgctcattaaacgacacctgaaagatcacccgatgtacgtccctcttatggagctgtttcacgaaggaaacctcaagactacactcggacaatctctcgatgctatgtgtcttgacactaacggaaagccaaagttggatatgttcactatgagtcgctacacatcgatcgtgaagtacggaaccgccttttactcattccaaatgccggttgccatcgctatgtatttggctggaatgtctgacgaggagcagcaccgtcaggccaagactatccttatggagatgggtcagtttttccagattcaggatgacttcctcgactgctttggcgatcccaccgtcaccggtaaggtcggaactgacattcaggatggtaagtgtagttggcttgccgtggtcgcactccaacgagcaagtcccgcccagcgaaagattatggaagagcattacggtcgtcccgagcccgagagtatcgcccgaattaagaacctatacgtggacctgtgcctccccaatacctacgcgatctacgaggaggagagcttcaatattattaagacacatattcaacagatttctaagggactgcgacatgaccttttctttaagattatggaaaagatctataagcgagaatgt

SEQ ID NO: 828 - DNA, 942 bp, Picea abies
atgaaggctctggtacagctggccgacctgtcagagcaggtcaagaacgtcgtcgaatttgacttcgacaagtacatgcactcgaaagcaattgccgtcaacgaggcgctcgataaggttatccctccccggtacccgcagaagatttacgaatctatgcgatacagcctcctagccggcggcaaacgtgtgcgacccatcctgtgtattgctgcttgcgagctgatgggcggcaccgaggagctggctatgccgacagcatgtgccatcgagatgatccacaccatgtctctcattcacgacgatctgccttacatcgacaacgatgaccttcgacggggtaagcccacgaaccacaaggtgttcggtgaggacacagcaatcattgctggtgacgccctgctgtccctcgctttcgagcatgtggctgtgtctacctcacgtacactcggcaccgatatcattctacgactgctttccgaaattggtcgagctactggatcggagggcgtcatgggcggccaggtcgtggatatcgagtcagagggcgacccctcaattgacctcgagactctggagtgggttcacattcacggcacagccgtgctcctggaatgctctgtcgtgtgcggtgccatcatgggtggggcgtccgaggacgacattgaacgagcccgccgatacgctcgttgcgtcggattgttgtttcaggttgtcgacgacattttggatgtgtctcaatcgtcagaagaactcggtaagactgccggcaaggacctaatctctgataaggccacttaccctaagttgatgggtctcgaaaaagccaaggagtttgcagacgagcttctcaaccgaggtaaacaggagctgtcctgcttcgaccctacgaaggccgctcccctctttgctctcgccgactacatcgcctcccgacagaac

SEQ ID NO: 829 - DNA, 900 bp, Abies grandis
atgaaggccgtagagtttgactttaacaagtacatggattccaaggcaatgactgtgaatgaggcactcaacaaagccattcccctgcgatacccccagaaaatttacgaatctatgcgttactcgctattggctggaggaaagcgtgtccgcccggtcctctgtattgctgcctgtgaactggtgggcggcacagaggagctggccatcccgactgcctgcgctatcgagatgatccataccatgtccctgatgcacgatgacttaccctgcatcgataatgacgacctaagacggggtaagcccaccaaccataagattttcggagaggacaccgccgtcaccgcaggaaacgccctgcatagctacgcttttgagcacatcgccgtgagtacttccaaaaccgtgggagccgatcgaattcttcgtatggtctccgagcttggtcgagctaccggttcggagggcgttatgggtggccagatggtggacattgcctccgagggtgacccctcaatcgacctacaaactctcgagtggatccacatccacggcactgctatgctgctcgaatgctctgtggtgtgtggtgcgattattggcggcgcgtccgaaatcgtcattgagagagcccgacgatacgccagatgtgtgggcctgttgtttcaggtcgttgacgacattctcgacgtaactaaatcctccgatgagctgggcaagaccgccggcaaagacttgatatcggacaaggccacgtaccccaagctaatgggactggagaaggccaaggagttcagtgacgagctgcttaaccgagcgaagggcgagctctcctgttttgaccctgttaaggccgccccgctattgggattggccgattacgttgcttttcgtcaaaat

SEQ ID NO: 830 - DNA, 1113 bp, Corynebacterium glutamicum
atgaaagacgtgtctctttcgtctttcgatgcccatgacctggatcttgataagttccctgaagtcgtgcgagaccgactcacgcagttcctggacgcccaggagctgaccattgcggatattggagccccagtcacagatgcagtggcccacctgagatcgtttgtgttgaacggcggcaagcgaatcagaccactttacgcctgggccggatttctcgctgctcagggtcataagaacagttccgagaagcttgagtccgtccttgacgcagccgcctcgctcgaattcattcaggcttgcgccctcattcacgacgacatcatcgactcctcggatacgcgacgaggagcacccacggtgcaccgagctgttgaggccgatcaccgtgccaacaacttcgagggtgacccagagcatttcggcgtttccgtctccatcctggccggcgacatggcgcttgtctgggcggaggatatgctgcaggactctggcctctccgcagaggctcttgcacgaactcgagacgcctggagaggtatgcggactgaggtgatcggaggacagttgctggatatctaccttgaaagccacgctaacgagtccgttgagctcgccgactctgtaaaccgctttggtaccgcagcttacaccatcgctcgacccctccacttgggcgccagcattgcaggcggttctccccagctgatcgatgcactcctccactacggccatgacatcggcattgccttccagttgagagatgatctcctgggtgtcttcggcgaccccgcaattaccggaaaacctgctggcgatgacattcgagagggaaagcgaactgttttgttggctcttgctctccagcgagcggacaagcagtctcccgaggccgctaccgccattcgagccggcgtcggtaaggtgacatccccggaggacattgcggtgattaccgagcacattcgtgctacaggtgccgaggaggaggttgaacagcgaatctcgcagctgaccgagtcgggactcgcccacctcgacgatgtggatatccctgacgaggtccgagcgcaactgcgggcactggcgattcgtagtacagagagacgaatg

SEQ ID NO: 831 - DNA, 1041 bp, Vitis vinifera
atgcttgcagaggagcaattggaccctttcagcctcgtggccgatgagctgtccctgctggctgaccggcttaggtcaatggtcgttgcagaagttcctaagctcgccagcgccgcggaatacttcttcaagatgggagttgagggtaagcgttttcgaccaaccgtcctcctcctgatggctacagcccttaacgttcccctaccccgacccgctctcgctgaggttcctgagaccctctccaccgagctgcgaacccgacagcagtgtattgcggagatcactgagatgatccatgtagcctcgctgctgcatgacgatgttttggacgacgccgaaacccgacggggaatcggctccctgaacattatgatgggcaacaaggttgccgtgctcgctggagactttttgctatcccgtgcttgtgtagccctcgcttctctgaagaacaccgaggtcgtcagtctgctggctacggttgtagagcacctggtcactggtgagaccatgcagatgacctctactagcgaacagagagttagcatggaatactacttgcagaagacctactacggaaccgcttcgttgatttcgaactcgtgtaaagccatcgctctgctggccggtcagacagctgaggtgtccatgctggcttttgaatatggaaaaaacctgggactggcgttccaactgatcgatgatgtcctcgactttacgggtacctcggcttccctaggaaagggcagcctgtcggatatcagacacggcatcatcactgctcccatcctgttcgctattgaggagtttccccaactggatgctgtcgtgaagcgaggtctggataacccggccgacatcgacctcgctcttgactacttgggcaagtctcgaggcattcagcggactagagagctcgctatgaagcacgcgaacctggcggctgaggcaatcgactctttgcccgagagcggagatgaggacgtgttgagatcgagaagagccctgattgacctcacccaccgagtgattactcgtaccaag

SEQ ID NO: 832 - DNA, 957 bp, Picea abies
atgcttcgctgttctaacacaaatgcccagttggcgaacctctccgaacaagtcaagggcaaggttacagagttcgatttcaaggagtacatgcgatctaaggctatgtctgtgaacgaggccctcgaccgagcggtgcccttgcgctaccccgagaagattcacgaggccatgcgttactccctgctggccggaggtaagagagtgcgacccatcctgtgtatcgccgcatgtgagctggtgggcgggtcagaggagttggccatgcctacagcctgcgccatggagatcattcacacaatgtctcttattcatgatgacctgccttgcatcgataatgacgacttgcggagaggcaagcctactaaccacaaggtcttcggagagggtaccgcggtcctggctggcgacgctctcttgtcgtttgctttcgaacatatagcagtgtccacaagcaagactgtggagtcggaccgcgtcctgcgagtcgtttccgagctcggtcgagcaattggttctgagggtgtcgccggtggtcaggtagcagacattacttctcagggaaacccatctgtcggcctcgagacactggaatggattcacattcataaaacagccgtcctcctggagtgctccgtcgcttccggcgccattattggtggggcttcggacgatgagattgaacgagttcgaaagtacgcccgatgtgttggactcctgtttcaggttgtcgacgacatcctggacgtgactaagagtagcgaagaacttggcaagaccgccgccaaagacttgctcagtgataaagctacttaccccaagctgatgggactcgaaaaggctaaggagtttgctgacgaactcctgggcaaggccaaggaggaattgtccttttttaaccccaccaaggcggcccccttgctcggattggctgattacatcgctcagcgccagaac

SEQ ID NO: 833 - DNA, 957 bp, Picea abies
atgcttcggtgcagcaacaccaatgcacagctcgccaacttgtcagaacaagtgaagggtaaagtgacggagtttgatttcaaagagtacatgcgaagcaaggccatgtctgtgaatgaagctctagaccgagccgttccactgagatacccagagaagatccacgaggcaatgcggtattctctgctggctggcggcaagcgggtcaggccaatcctctgtattgctgcctgtgagctcgtgggaggctctgaggagctggccatgcccaccgcttgtgctatggagatcattcacacgatgtccctcatccacgacgaccttccccccatggataacgacgacttccggcgaggtaagcctacaaatcacaaagtctttggagagggtaccgccgtcttggccggtgacgctctcctctcgttcgcatttgagcatattgccgtgtccacctcgaaaaccgttgaatctgaccgggtgctccgagtcgtgtcagagcttggccgggccatcggctccgagggagttgccggaggacaggttgctgatattacctctcagggaaacccttccgttggcctggaaactcttgagtggattcacattcacaagaccgccgtccttcttgaatgctccgttgcctcgggagccattattggcggtgcctcagacgatgagatcgagcgtgtccgaaagtacgctcgctgcgtcggcctgctgttccaggttgtagatgacattctggacgtgactaaatcctcggaggagctcggaaaaaccgcggccaaggatctgctatctgacaaagctacttaccccaagctcatgggtctagaaaaggctaaggagttcgctgacgaactcctcggcaaggccaaagaggagttgtctttcttcaatccaacaaaggctgctcctctgttgggactggcggattacatcgcccagcgacagaac

SEQ ID NO: 834 - DNA, 957 bp, Picea abies
atgctccgatgttccaacacaaatgcccagctagccaacctgtctgagcaggtcaagggaaaggtcactgagtttgactttaaggagtatatgagatcgaaggctatgagcgttaacgaggccctggatcgagccgtccctctacgataccccgagaaaatccacgaggctatgcgttactctctcctggcaggaggtaagagagttcgacccatcctttgtattgcggcatgtgagctcgttggaggttctgaggagctagcaatgcccacagcatgcgccatggagatcatccacacaatgtctctcattcacgacgacctcccacccatggacaacgacgatctgagacggggcaagcccactaaccataaggtttttggcgagggaactgccgtgctggccggcgatgccctgttgtctttcgcgtttgaacatattgctgtgtcaacatctaagactgtcgagtccgaccgtgttctgcgcgtggtaagtgagttgggtcgtgcaattggttccgaaggcgtagctggcggacaagtggccgatatcacctcgcagggtaacccttctgttggcctggagactcttgagtggattcacattcatggtaccgccgtactgttggaatgctctgtggcttcgggcgcaataattggcggcgcctcagacgatgagatagagcgagtcagaaaatacgctcgctgtgtgggactgttgtttcaggttgtggacgacatcctcgacgttacgaaatcgtccgaggaactgggaaagaccgctgccaaggacctgctctctgacaaggctacgtaccccaagctgatgggactggaaaaggctaaggagttcgccgatgagctcttgggcaaggctaaggaagagctgtcgttcttcaacccgaccaaggccgcccctttgctcggtcttgcagattatattgctcagcggcagaac

SEQ ID NO: 835 - DNA, 957 bp, Picea abies
atgctccgatgctcgaacaccaacgctcagcttgcaaacctatcagagcaggttaagggcaaggtaaccgagttcgactttaaggagtacatgcgatctaaggcaatgtcggttaacgaggccctagacagagctgtccccctgcgataccccgagaagattcacgaggcaatgcgctattccctgctcgccggaggtaagcgagtcagacccattctctgtatcgccgcctgtgagctggttggtggttcggaggagctagctatgcccactgcttgtgccatggaaatcattcacaccatgagcctcattcatgatgacctcccccccatggacaacgacgatttgcgaagaggtaagcccaccaaccacaaagtctttggtgagggaaccgccgtgctggcaggagacgccctcctttccttcgcgtttgaacatattgccgtgtccacctccaagactgtcgagtcggacagagttcttcgagtggtgagcgagctgggacgcgctattggctcggagggcgtggctggcggtcaagtggccgacatcaccagccagggcaacccctccgtgggattggagacgctcgagtggatccatatccataaaacagccgtgctgtttgaatgctctgtcgccagtggtgctatcattggaggtgcgtccgatgatgagatcgagcgagtccgaaagtacgctagatgtgtgggactgttgttccaggttgttgatgacattctcgacgtgacgaagtcgtccgaggagctcggcaagaccgctgccaaggatctgctttccgacaaggctacatacccgaagctaatgggactggagaaggccaaggaatttgccgacgaattgttgggcaaggctaaggaagagctgtctttcttcaatcctactaaggctgctcctttgctgggtctcgccgactacattgctcagcgtcaaaac

SEQ ID NO: 836 - DNA, 957 bp, Picea abies
atgctaaggtgctccaacacaaacgcacaactggccaatctatccgagcaggtcaagggaaaggtaacggagttcgatttcaaggagtacatgcgatctaaagcaatgtccgtgaatgaagcactggacagagccgtccctctccgataccctgagaagattcatgaggctatgcgttactcgcttctggcgggcggaaagcgagtccggcccattctctgcattgcggcatgtgaactcgtgggcggatcagaggagctggccatgcctaccgcctgtgccatggagattattcataccatgagtctgatccacgatgaccttcccccaatggataatgatgacctacgtagaggtaaaccgaccaaccataaggtcttcggtgagggaacagcagtgctggccggtgacgctctcctctcgttcgccttcgaacacatcgccgtctcgacctctaaaactgtcgaatccgatcgcgttctgagagtggtgtcagagctgggccgagctacaggttctgagggggtcgcaggcggacaagttgctgatattacttcgcagggaaacccctcggtgggcctagagacgctggaatggattcacattcataagaccgctgttctcctggagtgttcggttgcatctggtgccattatcggtggagcctcggatgatgaaatcgagcgagttcgcaagtacgcccgatgcgtgggcttactctttcaggttgtcgatgatatcctagacgtcaccaagagctccgaagaactcggtaagaccgccgctaaggacctcctatccgataaggccacctacccaaagctcatggggttggagaaggccaaggagtttgccgatgagctgcttggcaaggccaaggaggaactgtccttctttaacccgacaaaggccgcccctctgctaggcctcgctgactacatcgctcaaagacagaat

SEQ ID NO: 837 - DNA, 1059 bp, Sus scrofa
atgaacggggatcagaagctcgacgcgtacgctcgagaacgacaggacttcattcaacacttctcacagatcgtgaaggtcctgaccgaggaggatattggccatcccgaaatcggcgacgctgtcgcccgcctgaaggaggtgctcgagtacaacgttgttggcggaaagtacaaccgaggcattacagtgctggttgtcttcagagagctggttgagcctcgaaagcaggacgccgattcccttcagcgggctctgaccgtcggctggtgcattgagctcctgcaggccttttttctcgtagctgacgacattgaggattcgtcgctgacacgccgtggccagacctgttggtacagaaagcccggaattggactcgacgccatcaatgacgcttttctcctggaagcttgtatttacagactgctgaagttttactgtcgagaacaaccctactaccttaacctcatcgaactgtttcttcagacctcctacaacaccgagattggacagactctagacttgatcgccggcccccagggcaacgtcgacttgtcgcgattcacagaaaaacgttacaagtccatcgtgaagtacggtaccgctttttacagtttttatcttccagtggccgccgccatgtacatggccggaattgatggagagaaggagcatgccaatgctaagaagattctcatggagatgggagaattcttccagattcaggatgactacctggacctgtttggggatccttcagtaacaggaaagatcggtacggatattcaggataataagtgctcttggctcgtggttcaatgtctgcagagagcctcccccgagcagcgacagattcttcaggagaattacggccagaaggacgccgaaaaggttgctcgagtaaaggccctatacgaagagatgaaccttcaggctgtgtttctgcagtacgaggaggactcgtacagtcacctcatgggtcttattgagcagtacgcagcaccccttcctcccgccatcttcctcgagctcgcacacaagatttacaagagacgaaag

SEQ ID NO: 838 - DNA, 1059 bp, Acyrthosiphon pisum
atgccggtcatcacgggcacagccgtttcgaaagatgagactcgtgacttcatggccgtgttcccggatgtcgtgcgagacctcacggataccgggcgtaatctggatgtccccgacgtgactaagtggttggccaagctgctacagtacaacgtccctggaggaaagaagaaccgaggtctggcgcttgtgctgtcgtacaagatgctttcttcccccgctgaccagacggatgagaacattcgactgtcgtatatcctgggctggtgtgtcgagatcctacaggcataccagctcgtgctggacgatatcatggacaacgccatcacaaggcgtggtagaccctgttggtaccgacacaacgacatcggcctcatggctgtgaacgacggcgttctgctcgagcagtctatctaccagcttatcaagaagtacttcaaggataagccgtattacacgcacatcctcgagctgttttacgatgtgacgatgaagacctccatgggtcaatgtctcgacatgctgaccgccaactcgttcaagtcgaaaaagctagagaagtataccatggagaactacacagcgatcgtcaagtatggaaccgcttactactccttttttttgcccgtgtgcttggccatgcgaatgaccaatattaatgaccctgagatcttcagacaggccaagaccattctgctggagatgggtcacttctttcaagttcaggatgacttcctcgactgctacggagaccccgacgtgatgggcaagattgggacggacattgaggatggcaaatgtagctggctagcggtggtagctcttcagaaggtgaattctgagcagaagaagattatggaggataactacggaattgacaaccccgctaacgtggctgtcatcaaagatttgtacgcccagctgaagctaccagacacctttcacctgtacgaggaggaatcatacaagctcatttgcacccatatccagcagctttctcgaggcctttctcaggatatgttcttcaagttcttggagaagatctacaagaggactctg

SEQ ID NO: 839 - DNA, 1077 bp, Mycobacterium tuberculosis
atgcggggaaccgacgagaagtacggtctccctccccagcctgactcggacagaatgacccgaaggaccctgcccgtgctgggattggcgcacgaactgattacccccactctgcgacagatggctgatcgactagaccctcacatgagacccgtggtgtcttaccatttgggctggtctgatgagcgagggcgtccagtcaacaacaactgcggtaaggcgatccgacccgccctggtgttcgtagcagccgaggccgccggagccgacccgcactctgctatccctggggccgtctcggttgagttagttcataacttctcgcttgtccacgacgatctcatggacagagacgagcaccgtcgacaccgaccaaccgtctgggcattgtggggggacgccatggccttgctggccggtgatgctatgctctccctggctcatgaggtgttactggactgcgactctcctcacgtgggagccgccctgagagcaatctccgaggccacacgcgagctgattcgtggccaagctgcagacactgcatttgagtcccgtaccgacgtcgccctcgacgagtgtctgaagatggctgagggaggtacagccgcgctgatggctgcatcggctgaggtgggagccctccttgccggagcccctcgaagcgtgcgcgaagcactggtcgcgtacgggcgtcatattggtttggcatttcagctagtcgatgaccttctgggaatttggggaagacccgaaatcaccggtaaacctgtttactctgaccttcgaagccgaaagaaaaccctgccggttacttggaccgtcgctcatggaggcttagccggtcgtcgactcgctgcctggctcgtggatgaaactggctctcagaccgcttctgatgacgaactcgctgcagtggccgaacttatcgaatgcggaggtggccgacgatgggctagcgccgaagctcgacgacatgttactcaaggcatcgatatggtggcccgaatcggaattccagaccgacccgccgccgagctgcaagacttggctcattacattgtggaccgacaagcg

SEQ ID NO: 840 - DNA, 879 bp, Staphylococcus aureus
atgacaaatctccccatgaacaagctcattgatgaggtgaacaacgaactgtctgtcgctatcaacaaatctgtgatggacacgcaactggaggaatccatgctctactcgctcaatgctggcggcaagcgaatccgacccgtgctcctgctgcttactttggacagtctcaacacagagtacgaactgggaatgaagtcggccatcgcactcgaaatgattcacacgtactctctgattcacgacgacctgcccgcaatggacaacgacgactatagacgagggaagctcaccaaccataaggtctacggagagtggaccgccattcttgccggagacgcgctgctcacaaaggccttcgaactgatctcttctgacgaccggctcaccgacgaggttaagattaaggtcctgcagcgattgagcattgcaagtggtcatgtgggaatggttggtggccagatgctcgacatgcaaagcgagggtcagcccatcgacctcgagacactggagatgatccacaagaccggtacgggtgcgctcctcacgttcgccgttatgagcgcagccgacattgcaaacgtggatgatactaccaaagagcacctggagtcgtactcttaccacctcggaatgatgttccagattaaggatgatctactggattgctacggcgacgaggcaaagcttggaaagaaagtgggttcggacctcgagaataacaaatctacgtacgtgtctctgcttggcaaggatggcgctgaggacaagctgacctaccatcgagacgctgctgttgacgagctgacccagatcgacgagcagttcaacaccaaacatctgctcgaaattgtcgatcttttttactcgcgagatcat

SEQ ID NO: 841 - DNA, 891 bp, Geobacillus sp. WSUCF1
atggctcaactttctgtggagcagttcctgaacgaacagaaacgcgccgtggaggccgcgctgtcttcctatatggcccgacttcgtgggcccgagactctcaagaaagccatggcatactctctggaggcaggaggaaagcggattagacccttgctgttacttgcaaccatccaagccctgggcaaggaccctgccatcggcctgcccgtggcttgtgccatagaaatgattcacacctatttcctaatacacgacgacttgccctgtatcgataacgacgacctacgccggggtaaacctacaaaccacaaagtttttggcgaggcgatggccatcctcgccggcgacgccctcctgacctatgctttccagttgatcgcagaggtagacgatgaccgcgtgcccccctcggttagactgcagctcattgagcagctggcaaaagctgcaggccctgagggcatggttgctggacaggccgccgacatggaggccgagggtaagacactggcgctggctgagttggaatatatacatcgacacaagaccggaaagatgctgcagtactccgtccacgctggcgcactgttgggaggagcggacggacgacaaactcgggaactcaacgagttcgccgctcatctcggactggcttttcaaatccgagatgacatcctggacatcgagggcatggaggagaagatcggcaaaagagtgggatccgaccgagacaacaagaaagccacataccccgtcctgctgtctctcggaggagccaaggaaaagcttgccttccacattgacgcagctaagcgtcacctgcagcaggccaagatcgatgatgccgtactggcctacatttgtgagctggtggcagttcgtgaccac

SEQ ID NO: 842 - DNA, 891 bp, Geobacillus sp. WSUCF1
atggctcagctgtcagtggaacagttccttaacgagcagaagcgtgcagtggaggctgctttatcttcttacatggcgcggctgcgtggccccgagacccttaagaaagcgatggcctacagtctggaggccggcggcaagcgaattcggcccttactgctcctggccaccatccaggccttgggaaaggaccctgcgatcggtctacctgtggcctgcgctattgaaatgatccacacctactcgctgattcatgacgacctgccttgcattgataacgacgacctgagacgagggaagcccaccaaccacaaggtgttcggcgaggctatggcaattctagcaggcgatgctcttctcacgtacgccttccagctgattgccgaagtcgacgacgaccgggtgcccccctccgtgcgcctgcagctgatcgagcagctcgccaaggccgcgggacctgagggcatggtcgcaggtcaggctgctgacatggaggctgagggcaagaccctcgccctcgccgaactggaatacattcatcgacataagaccggaaagatgcttcaatactcggttcacgctggtgccctcctgggaggagccgatggccggcagacccgagagcttaacgagtttgctgcacacttgggtcttgcttttcagattcgagacgatatcctggacattgagggcatggaggagaagattggtaaaagggtcgggtcggaccgcgacaacaagaaggcaacctaccccgtactcctctcgttgggtggcgccaaggagaagctcgccttccacatcgacgcagcgaagcgacacttgcaacaggctaagattgacgacgcagtccttgcttatatttgtgagctggttgctgtccgagaccat

SEQ ID NO: 843 - DNA, 891 bp, Geobacillus sp. WSUCF1
atggcccagctgagtgtggagcagtttctgaacgagcagaagcgagccgtggaggcagcattatcctcgtacatggcacgacttcgaggccccgaaacgcttaagaaggcgatggcctactccctggaggctgggggtaagagaatccgacccctgttactccttgctactatccaggctttagggaaggaccctgctatcggtctgcctgttgcgtgcgccattgagatgatccacacctactccttgattcacgatgacctgccgtcgatggacaacgacgacttccgaagaggtaagcctaccaatcacaaagtcttcggagaagccatggccatccttgcaggcgacgctcttctaacttatgccttccagctcatcgctgaggtggatgacgatcgagtccccccgtctgttcgtctgcagctgatcgagcagcttgctaaggccgccggacccgaaggcatggtggctggtcaagctgccgacatggaagccgaggggaagactttggcacttgccgagctggaatacatccaccgtcacaagaccggaaagatgctccaatactccgtccatgccggagctctcctgggtggcgccgatggtaggcagacacgggaactcaacgagttcgctgcccatctgggcctggctttccagatccgtgacgatatcctggacatcgaaggtatggaggagaagatcggtaaacgagtaggatcagatcgggataacaagaaggctacctaccccgttcttctttccttgggtggggccaaggaaaagctggcctttcatatcgatgcagctaagcgacatctccagcaggcgaaaatcgacgatgctgtactcgcttacatctgtgagcttgtggcggttcgagaccat

SEQ ID NO: 844 - DNA, 891 bp, Geobacillus sp. WSUCF1
atggcgcagctgtctgtcgaacaattcctgaacgagcaaaagcgagccgttgaggccgctctctcatcttacatggcccgactcagaggtccagagactctcaagaaggccatggcctactctctggaagctggaggcaagagaattcgaccgctattgcttctcgctacaatccaggccttgggcaaggatcccgccatcggcttgccggtggcttgcgcgatcgagatgattcacacctactcgttaatccacgacgacctgccttccatggataacgacgacctccgacgtggaaagcctaccaaccacaaggttttcggagaggccatggctattctcgcgggcgacgcattgttgacttacgccttccagctgattgccgaagttgatgatgacagagttcctcctagcgttcggctccagctgatcgagcagcttgccaaggctgcaggaccagaaggaatggttgctggacaagccgcggatatggaggctgaggggaagaccctagcattagccgagctggaatacatccaccgacacaagactggcaagatgttccagtacagcgttcacgctggcgccctcctgggcggagctgatggccgacagactcgcgagttgaacgagtttgctgcccatctggggctagccttccagattagggatgacattctggacattgagggcatggaggagaagattggtaagcgcgttggaagtgatagagataacaagaaagctacttacccagtcctgttgtctcttgggggggccaaggagaagcttgccttccacatcgatgccgccaagcgacacctgcagcaggccaagattgacgacgcagtgctcgcatatatctgcgaattggtcgccgtgcgagatcat

SEQ ID NO: 845 - DNA, 912 bp, Rhizobium acidisoli
atggacgccaaccgagacacatttgagactcgactcaaaaataacgcgcgggagattgaagccctgcttgacgctctgctgctcccaaacgcactctctgacgaaattgctagaccagaaactcttcgatctgctatgcattatgcagtccttaacggtggcaagcgccttcgtccctttctcgtcgtagagtcggccgcactgctcggaggtgacgacgaggccgctcgcagagtcggagctgccctcgaatgcgtacactgttactttctcgttcacgacgacttgccctgtattgatgacgatgacctgaggcgaggtaaacctaccgtgcatattaagttcgacgaggcgactgccatactcgccggcgactctctcctgacctacgcgtttgacatcattgcagcacccgagacggcgctggctgacacttcaaaggcttcccttgtgctcgccctcgcacgtgccgctgggctgggaggaatggccggcggtcaggctctcgaccttgccgccgaaaagcaggcacctgacgaagccggcatcattcggctccaagctatgaaaacaggcgcgctgattcgattcgcatgcgaagctggagccctaattgctgctagtcccccagaagaccgacggcgtttgcgtgcttttggagaaaaaattggtctggccttccagctcgctgacgacattctcgatcttacctccgatacggctactatgggcaaggcaacaggaaaagacgccgctaggggaaagggaacccttgttgcactccacggcatcgagtgggcagaggaacagctgcgacaacacgtgcgggacgccgaggcactacttgctccctacggcgctcgagcatccactcttattgccgcggcccatttcatcgctgaccggaagtcg

SEQ ID NO: 846 - DNA, 912 bp, Rhizobium acidisoli
atggacgccaaccgcgacacgttcgaaacacggttgaaaaacaacgcaagagagatcgaggcgcttcttgatgctctgttgctgcccaacgccctgtctgatgagattgcccgacctgagaccctgcggtccgccatgcattacgcagtgctgaacgggggtaagcgattgaggccgttcctggtggtggagtcggctgcccttctgggcggagatgatgaggccgctcggcgagtaggcgctgccctcgaatgcgtccactgctactccctagtgcatgatgacctgcccgctatggatgacgacgactttcgtcggggtaagcccaccgttcacattaagttcgacgaggccacagctatccttgcgggagacagtctcttgacttacgccttcgatatcatcgctgccccagagacggccttggccgacacctccaaggcctcgttggtcctcgccctcgctagggctgcaggtcttggtggcatggctggcggacaggcactggatctggctgctgagaagcaggcacctgatgaggctggcattatcagactccaggcgatgaagactggcgctttgatccgattcgcatgtgaggcgggtgccttgattgctgcatctcccccggaggaccgacggcgtcttcgtgcctttggtgagaagatcggcctcgcgttccagctggctgacgacattctcgacctgacatcagacactgccaccatggggaaggcaactggcaaggacgccgcacggggtaagggtacgctcgtcgccctgcatggcattgagtgggcagaggagcagctgcgtcagcacgttcgggatgctgaagcactactggccccttacggtgctcgggcctcaaccttgatcgccgctgcccactttattgctgacaggaagtct

SEQ ID NO: 847 - DNA, 912 bp, Rhizobium acidisoli
atggacgccaaccgagacactttcgagacgcgacttaaaaacaacgcccgtgagattgaggccctccttgatgcacttctactaccgaacgctctgagcgacgaaattgcccgaccggagactctcagatctgctatgcactacgctgttcttaacggcggcaagcgactacgcccgttcctcgttgtcgagtctgccgccctgctgggcggcgacgacgaggctgctcgaagagtcggcgcagccttggaatgcgtacactgttactccttggtccacgacgacctgccatgtattgacgacgacgacctccgacgaggcaagcctacagttcatattaagtttgatgaggcaaccgccattctggcaggagattccctcctgacctacgcctttgacatcatcgctgcccccgagacagctctggcagacacttctaaggctagcctcgtacttgctctcgctcgagcggccggtctcggcggaatggctggaggacaggctcttgatctggccgctgagaaacaggccccagatgaggctggaatcattcgactgcaggctatgaagacaggagccctgattcgatttgcctgtgaggccggtgcgctgatcgcggcttctccccccgaggaccgacgacgactgcgagcgttcggagagaagatcggccttgccttccagcttgcagatgacatcttggacctcacttcggacacagctaccatgggcaaggctactggcaaggacgctgcccgaggaaaaggaaccctagtcgccctccacggcattgagtgggccgaggagcaactccggcagcatgtgcgagatgctgaggctctgctggcaccctacggagctagagcctcaaccctgattgcagctgcccacttcattgccgacagaaaatct

SEQ ID NO: 848 - DNA, 897 bp, Escherichia coli
atggactttccccaacagttggaggcttgcgtgaagcaggctaaccaagctctctcccgattcatcgctccactgccgttccagaatacgcctgtcgtagagacaatgcagtacggtgccctgctgggtggcaagcgactacgcccgtttctagtatacgcaaccggacacatgtttggagtctccactaacactctggacgccccagccgcggccgtagagtgcatccacgcctacttcctcattcatgatgatctcccctgtatcgacgacgatgatcttaggcgaggtctaccaacgtgtcacgtcaagttcggtgaggctaacgctatcctggccggagacgcccttcagacactggctttctctatcctgtctgacgcggacatgccagaggtatctgaccgagatcgcatctcgatgatttcggagctggcctcagctagcggcattgctggtatgtgcggaggtcaggcactggacctggacgccgagggcaagcatgtgcctctggatgccctggagcgcattcaccgacataagactggcgcgctcattcgggccgctgtacgactgggcgctctttctgccggggacaagggtcgacgagccttgcccgtgcttgataagtacgcggaatcgatcggcttggcctttcaggttcaggatgacatcctcgacgtcgtcggtgacaccgccactctgggaaagcggcagggagccgatcagcagctgggcaagtctacttaccctgccctgctcggactcgagcaggcacgaaagaaggcacgagacctgattgacgacgctcgacaatccctgaagcagctcgctgagcagtccctggatacttctgcgctagaggccctcgctgactacattattcagagaaacaag

SEQ ID NO: 849 - DNA, 897 bp, Escherichia coli
atggatttcccccagcagctggaggcttgcgtgaagcaggctaaccaggcgctgagtcgattcatcgcccccctgccctttcagaacacccccgtcgtcgagactatgcagtatggtgcgctgctgggaggcaagcgcttgagaccgttccttgtctacgccactggtcatatgttcggagtatccaccaataccctcgacgctcccgccgctgctgtcgagtgcattcatgcatactctctgatccacgatgatctacccgctatggacgatgacgacttccgacgtggattacctacctgccatgtgaagtttggcgaggctaacgcaattcttgctggagacgccctccagacacttgccttctcgattctctctgatgctgatatgcccgaggtgtccgacagagaccgcatttctatgatttccgaattggcatcggccagtggcatcgctggtatgtgtggcggccaggccctggatctcgacgcggagggtaagcacgtcccgctggatgctttggagcgcatccatcgacacaagaccggggccctaattcgtgctgctgtgagactcggtgctctcagtgccggtgacaagggtcgccgagctcttccagtcttggacaaatacgccgagagtattggactcgcttttcaggtgcaggacgatattcttgacgtggtcggcgacaccgccacgctgggaaagcgacagggcgctgaccagcagctaggtaagagcacttaccccgctctcctcggtctcgagcaagctcgtaagaaggccagggacctcatcgacgacgccaggcagtccctgaagcagttagctgagcaatcacttgatacgtccgccctcgaagccctggctgactacatcatccagcgcaacaag

SEQ ID NO: 850 - DNA, 897 bp, Escherichia coli
atggattttccccagcagctcgaggcttgcgtcaagcaggcaaaccaagcgctctctagatttatagcgcccctcccattccagaatacacccgttgtggagacaatgcaatacggtgcccttctaggtggtaagcgacttcgaccatttctcgtgtacgctaccggacatatgtttggtgtatcaaccaacacccttgacgcccccgcagcggccgtcgagtgcatccatgcgtatagccttattcacgacgaccttccttgcattgacgacgacgaccttcgacgaggcctgccgacgtgccacgtgaagttcggcgaagcgaacgctatcctagccggagatgctctgcagacgttggcattctcgatcttgtctgatgccgacatgcccgaggtttctgatcgggaccgtatctcgatgatctccgagcttgccagcgctagcggaattgcaggaatgtgcggagggcaggccctggatctggacgctgaaggaaagcacgtgccccttgacgctctagagcgaattcaccgacataagacaggggctctgatccgtgccgccgtccggctgggcgccctgtccgctggagacaaaggccgacgtgccctgccagttctggacaagtatgctgagagcattggcctagcctttcaagtgcaggacgacattctggacgtcgtgggagacactgctaccctgggaaagcgtcagggagcagaccagcagctgggtaagtcaacctaccccgccctcctgggactcgagcaggcgcgtaagaaggctcgggatttgatcgatgatgcccgccagtccttaaaacagttggcagagcagtccctagatacatctgctctcgaggcacttgccgactacataattcagcgtaacaaa

SEQ ID NO: 851 - DNA, 912 bp, Brucella suis
atggaaaagttgcctgtggatttcaccacgctcctgaaccgacgggctatggaagttgaagcggctttggccggactcttggacgaatgtccccgcactggggaaattgcacgacctcagcgactcattgctgcgatgcgacatggtgtcctcaatggcggcaagcgcctgaggccctttttggtccttgaatctgccgccttgttcggccagtacggacaggcagtgctgcgtgtggcggccgccttggagtgcatccactgctacttcctggtgcacgacgatctgccttgcattgacgatgacgacttgcgacgaggacaacccacggtgcacaaggctttcgatgaggccgccgcaattcttgccggggatagtctgcttacctacgcgttcgacatcatcgcctctgacgagaccgagctggacgccacaacccggatcaagctcgtctgtgccttgactcgggcgagcggactcggaggaatggccggcggacaagcccttgacctgatggccgagacccgaaagcctgacgaggccggcatcattaccctgcaggccatgaagacgggcgccctgatccgtttcgcgtgtgaggcaggcgccattatcgcgggagcctctcaggaagacagagagagaatggccgagttcggcagtgcaatcggcctggcattccagctggcggatgaccttctggatgttacagccgacgcgggtacaatgggtaaggccaccggcaaggacgccgctgctggaaaggcgaccctcgtctcccttcacggtatcgactggacccgacagcaactcagtggactggtggcccaggccgagagtctgctggctccttttggagaagacgctgagcctctcaagcaagcagctcgatttatcgcagagagacagaac

SEQ ID NO: 852 - DNA, 912 bp, Brucella suis
atggagaagctccctgtcgacttcacaaccttgctgaaccggcgcgccatggaggtcgaagccgcgctagccggtcttctcgacgagtgcccccgaacgggtgagattgccagaccccaacgactgatcgcagccatgcgacatggagtgctcaacggaggtaaaaggctccgaccctttctcgttctcgagtccgccgccctgttcggtcagtacggacaggccgttctgcgcgtcgccgctgcgctggagtgcatacactgttactctctcgttcatgacgacctgccttgtattgacgatgatgacctgagacgcggtcagcctaccgttcataaggcgtttgacgaggctgcagccattcttgccggcgattctcttctcacttacgctttcgacatcattgcctcggacgagactgaactcgacgcaaccacccgaattaagcttgtgtgcgccctcacccgagcctcagggctgggtggtatggcgggaggccaggcccttgacctcatggccgagactcggaagcccgatgaagccggaattattactctccaggcaatgaagaccggcgcactgattcgatttgcatgcgaggcaggcgcaattattgcgggagcctcccaggaggatcgggagcgaatggccgaattcggatcggctatcggcctggctttccaactggcagacgacttgctcgacgttaccgccgacgccggcacaatgggtaaggcgactggtaaagacgcggcagcaggaaaggccacgcttgtgagtctgcacggcatcgactggactcgacagcaactgtctggactggtcgcccaggctgagtcgctgctggccccattcggagaggacgcagagcctctgaagcaggccgcgaggttcattgccgagcgacagaac

SEQ ID NO: 853 - DNA, 846 bp, Buchnera aphidicola
atgcatttttttcacctttacgaacgatataagcatcgaatcaaccagaagctcttctacactctgaatcagctacctttccagaaatcgtccctcctgaaggccatgaagtactcggtcttctcgggctccaaacgactgagaagctctttgatttattctacgggagatgtgttcaaggtcaacatcaccacgttggatgtgatcagcactgcaatcgagtttatccattcgtactttctgatccatgatgaccttccctgcatagacaatgacaacttcagaaggggaaaaatctcgtgccacgtcaagtacggagaatccacctcactccttgctggagatgcactgcaatcactggccttcaatatcctctctaactcctttatgcctaatgtctcaaacctaaagcggatcaagatgattagtgagctgtcttattcgattggatccagtggcatgtgtatgggacaaaatctggaccttgaggcagagaagaaggatgttaacctatccgagctcgagatcatcaacctctacaagacatcctttctcatgagatctgctgtgcgtctcgtttatttttcttcaaacaatttctctaagtctatccttagcattctggacctgttttccattagtatcggactggcttttcagattcaagatgacattctggacttcaagaaggattccgtcaagactgacaacaagaagattattaagaagcacacctaccccctcatcattggtctggacgagtcacgaaaaaaaattaagcagctccacaagaaaagctttctcgccctcaactccttgaagaagaagatttctatcccaacctat

SEQ ID NO: 854 - DNA, 846 bp, Buchnera aphidicola; identical to SEQ ID NO: 853

SEQ ID NO: 855 - DNA, 846 bp, Buchnera aphidicola
atgcacttcttccacctctatgaacgatacaaacatcgaattaaccagaagctgttctatactctgaaccagttgccctttcagaaatcctctctgttgaaggccatgaaatacagtgtgtttagcggatcaaaacgactgaggtcttcgttgatttacagcactggcgacgtcttcaaggtcaacattaccaccctggatgtgatttctaccgccatcgaatttattcactcttattcactgattcacgatgatctgccctgtatggacaacgacaactttcgacgtggtaagatctcatgccatgttaagtacggcgagagtacctcgctccttgcaggcgacgcattgcaatcccttgcctttaacattctctctaattcattcatgcctaatgtttccaacctcaagcgaattaagatgatctccgagttgagctactctacggggtcctcgggtatgtgcatgggccagaacttggacttggaggccgagaagaaggatgttaacctctctgaactggagattatcaacctctacaagacgtccttccttatgcgctcggccgttagattggtttatttctcatctaacaactttagtaaatccatcctgtccattctggatctcttctcgattagcattggactggcctttcagatccaagacgacattctcgactttaagaaagactcggttaaaaccgataacaagaagatcattaagaagcacacctacccccttattatcggactggacgagtcgagaaaaaaaattaagcaactgcacaagaagtcctttctagctcttaactccctcaagaaaaagatttccattcccacttac

SEQ ID NO: 856 - DNA, 1065 bp, Dendroctonus ponderosae
atgattcgaccggtgcaaagctctgctctcgttacgaaagagcagtctcgggacttcatggctctgtttcccgaccttgtcagagagctgaccgaggtgggtaagtcgcaagagctgcccgatgtgatgcgacgattcgcccgcgtcttgcagtacaacacccccaccggaaagaagaatcgaggtctgattgtcctgtctacctaccggatgctggaggaccctgaaaaactgacccccgagaacatccggcttgcgtccatcctgggatggtgtgtggagatggttcacgcctactggctcatcctcgatgatatcatggatggctcagaaacccgacgaggtgccctctgttggtttcgacaatccggtattggactcacagccgtttgggatgcagtcatgatcgaaaacgctgtctacctcctgattaagcgtcacctcaaggaccaccccatgtacgtgcctctgatggagctctttcacgagggtaacctaaagaccacgcttggacagtccctggatgccatgtgcctggatacaaacggtaagcccaagcttgacatgtttacaatgtctcgatacaccagcattgtgaagtacaagacagcgttctattccttccagatgcccgtggccatcgccatgtacctggccggaatgtccgatgaagagcagcaccgacaggccaagactattctcatggagatgggccagtttttccagatccaggacgacttcctcgactgttttggcgaccctaccgttaccgggaaggtcggcactgacatccaggacggcaagtgttcgtggctggccgttgttgccctgcagagagcttcgccggcccaacgcaaaattatggaagagcattacggtcgacctgagcctgagtcgattgctagaatcaagaatttgtacgtggacctttgcctgcctaacacatacgccatttacgaggaggagagctttaacataatcaaaacccacattcagcagatttcgaagggtcttcgacatgacctcttcttcaagatcatggagaagatttacaagcgggagtgc

SEQ ID NO: 857 - DNA, 942 bp, Picea abies
atgaaagccttggtgcagttggccgacctgtctgagcaggtgaagaacgtggtcgagtttgactttgataagtacatgcattctaaggcgatcgccgttaacgaggcacttgacaaggtgatcccccccagatatcctcagaaaatctatgagtctatgcggtattccctgcttgccggaggtaaacgtgttcgacccatcctctgtattgctgcctgcgagctcatgggaggaactgaagagctagccatgcccaccgcctgtgccatcgagatgatccatacgatttcactgatccacgatgacctcccttacatcgataacgacgatctacgacgggggaagcctaccaaccataaagtctttggggaggatacggccatcatcgctggcgatgcgctgctttccctggctttcgaacatgtcgccgtgtccacgagccggacacttggaactgacatcatcctgagattgctatcggaaattggacgtgcgacgggctcagaaggcgtgatgggaggtcaggtggttgatatcgagtcagagggtgatccctcgatcgatctggagacgctggagtgggtgcacatccacaagacagcagtgcttctcgagtgttccgttgtgtgtggagccatcatgggcggtgcatccgaggacgacattgagcgagctcgacggtacgcccgatgcgtcggcctgctgtttcaggttgttgatgatattctcgacgtttctcagtcttccgaggagcttggaaagaccgcaggcaaagacttaatctccgacaaggctacctatcccaagctcatgggactcgagaaggccaaggagttcgccgacgaactcctgaacagaggaaagcaggagctctcgtgctttgaccccaccaaggctgcgcctctattcgccctcgccgattacattgctagtcgtcagaac

SEQ ID NO: 858 - DNA, 942 bp, Picea abies
atgaaggccctggtccagttggctgatctgagcgagcaggtgaaaaatgtggttgagttcgattttgacaaatacatgcactccaaggccatcgccgtcaacgaagccctggataaggttatcccaccccgatacccccagaagatctatgaatcgatgcggtacagtctcctcgctggaggtaagcgagtccgtcccattctgtgcattgcggcctgcgagctgatgggcggtaccgaagaactcgcaatgcctaccgcctgcgctatcgagatgattcatacaatgtccctgattcacgatgaccttccgtatatagacaacgatgattttcgacgaggtaagccaacaaatcacaaggtgtttggagaagacaccgccatcatcgcaggagacgctctgctctctctggctttcgaacatgtggccgtgtctacttcacggacccttggcactgacattattctgaggctgctgtcagagattggtcgggctaccgggtctgagggcgttatgggcggccaggtcgtggatattgaatcagagggcgatccgtccattgacttggagaccctggaatgggtccatattcataagactgcagtacttcttgaatgctcggtggtctgcggtgcaatcatggggggcgcgagcgaggatgacatcgagcgggcccgtagatacgcccgatgcgttggattgctcttccaagttgtggacgatattctcgacgtctcccagtcctctgaagagctgggtaagaccgccggcaaggacctgatctccgacaaggccacctaccccaagctgatgggactggagaaagctaaggaattcgcagatgaactgctcaaccgaggtaagcaagagctcagctgctttgaccccacaaaggctgcccctctttttgcactcgctgactatattgccagccggcagaac

SEQ ID NO: 859 - DNA, 942 bp, Picea abies
atgaaggccctggtccagctcgcggacctgtcggagcaggtgaaaaacgtggtggagttcgatttcgacaagtacatgcactcgaaggccattgctgtgaacgaggctttggataaagtgattccgccccgatacccacagaagatctacgagagcatgcgatactctctgctggcaggtggtaagcgagtgcggcctatcctgtgtattgcagcctgcgagttgatgggcggcaccgaagagctggctatgcctacagcttgcgccatcgaaatgatccacaccatgtcacttattcatgatgatctaccttacatcgacaacgatgatctgcgacgtggtaagcccacaaaccataaggtcttcggagaggacactgcgatcattgccggcgacgcccttctgtctctggcctttgagcacgttgccgtgtctacgtccagaaccctgggtactgatattattttgcgactcctgtcagagattggtcgagccacaggctctgagggcgttatgggcggacaagtagtagacatcgaatctgagggtgatccatcaattgatctggagaccctagaatgggtgcacatccataagactgccgtgctttttgagtgttcggttgtgtgtggcgcaattatggggggagcttctgaggatgatatcgagcgcgcccgacggtatgcccgatgtgtcggccttctcttccaggtcgttgacgacattcttgacgtgtctcagagctccgaagagctcggaaagaccgctggtaaggatctgatctccgacaaggccacctaccctaagctgatgggtcttgagaaggctaaggagttcgctgatgagctgttgaaccgaggcaagcaggagttgtcttgctttgaccccaccaaggccgctcccctttttgccctggcagactacatcgcctctaggcagaac

SEQ ID NO: 860 - DNA, 900 bp, Abies grandis
atgaaggctgtggagttcgacttcaacaagtatatggactcaaaggcgatgaccgtgaatgaggccctcaacaaagccatcccactgagatatccgcagaaaatctacgagtctatgagatactccttgctagcaggcggcaagcgtgtccgtcccgtgctctgcattgctgcttgcgagttggtgggagggactgaggaactggccattcccaccgcctgcgcgatcgagatgatccatactatctcgctgatgcacgacgatctaccatgcatcgacaacgacgacttaagacgaggcaagccgacaaaccacaagattttcggcgaggacaccgccgttactgccggaaatgcccttcactcatacgcctttgagcacattgccgtttcgacatctaagaccgtgggcgcggatcgaatcctgagaatggtgtctgagctcggtcgagcaactgggtcggagggtgtcatgggcggacagatggtcgacattgcttctgagggtgaccctagcattgatcttcagactttggagtggatccatattcacaagacggccatgcttctggagtgcagcgtcgtctgtggcgccattattgggggcgcttctgagatcgtgattgagcgagcccgacggtacgcacgatgcgtcggactgctcttccaggtcgttgatgacatcctggacgtgaccaaatcttcggacgagctgggaaagactgccggaaaggatctcattagcgacaaagcgacctaccccaagctgatgggcctcgagaaagctaaggaattttcagacgaacttctcaaccgagcaaagggtgaactgtcctgtttcgaccctgtgaaagccgcccctctcctgggcctggcggactacgttgcatttcgacaaaac

SEQ ID NO: 861 - DNA, 900 bp, Abies grandis
atgaaagctgtggagtttgatttcaacaagtacatggactccaaggcaatgaccgttaatgaagccctgaacaaggccattcccctgcgatacccccagaaaatttacgagtcaatgcggtactcgctcttagcgggaggaaaacgcgtgcgccctgtgttatgcatcgccgcatgtgagcttgttggaggaactgaagagctagccattcctaccgcgtgcgctatcgaaatgatccatactatgtcgctgatgcatgatgacttgccctgtattgacaacgacgactttcgacgaggaaagcccactaaccataagatcttcggcgaggacaccgccgtcactgccggaaacgctctgcactcctacgctttcgagcacatcgctgtctccacaagtaagaccgtgggagcagaccgcattcttcggatggtgagcgaactcggccgagctactggttctgagggcgtgatgggtggacagatggtagacatcgcgtccgagggagacccctctattgatctgcagactttggaatggatccatatccacaagactgctatgctgcttgagtgttcagtcgtgtgtggcgctatcattggaggcgctagcgagattgtgatcgaaagagccagacgttacgcccgatgcgtgggccttttgtttcaggtggtcgatgacatccttgacgttactaaatcttctgacgaactgggaaagaccgctggtaaggacctgatatctgacaaggctacctaccccaaactgatgggtctggagaaggccaaagagttctccgacgaattgttgaaccgggctaagggcgagctttcctgcttcgacccggttaaggccgctccccttcttggccttgcggattacgtggctttccgccaaaac

SEQ ID NO: 862 - DNA, 900 bp, Abies grandis
atgaaggctgtcgaatttgacttcaacaagtacatggatagcaaagctatgaccgtgaacgaggccttgaataaggctattcccttgcgatatccgcaaaagatttatgagtctatgcgatactctctgctcgctgggggaaaacgagtccggcctgtgctgtgtatcgcagcctgtgagttggtcggaggtaccgaagagttggctatacccaccgcttgtgcgattgaaatgatccacactatgtcgctgatgcatgacgacctgccatgcatcgataacgatgacctgcgaagaggaaagcccaccaaccacaagatattcggggaggatactgcagttacggcaggtaacgccctgcattcctacgccttcgagcatatcgcagtttcaacttccaagaccgttggcgccgaccgaattctccgaatggtctctgagctcggacgagctacaggatcagaaggagttatgggcgggcagatggttgacatcgcatctgaaggcgacccctcaattgacctccagactcttgagtggatccatatccataagaccgcgatgttatttgagtgttccgtggtctgtggcgccatcatcggcggtgcctcggagatcgtcatcgaacgagcccggcgatatgcgagatgcgtgggcctgctctttcaagtggttgacgacatcctggacgtcaccaagtcttctgacgagctcggcaaaaccgcaggaaaggacctgatctcggacaaggccacttaccccaagctgatgggacttgagaaggcaaaggagttctccgatgagctgctcaaccgagccaagggtgaactctcgtgctttgaccctgttaaggccgcgcctctgctaggcctggcagattatgtagcgtttagacagaat

SEQ ID NO: 863 - DNA, 957 bp, Picea abies
atgctccgatgctctaacaccaacgcccagctcgcaaacctgtccgaacaggtaaagggcaaggttaccgagtttgatttcaaggagtacatgcgaagtaaggctatgtctgtcaacgaggctttagacagagcagtgccgcttcgataccccgagaagattcacgaggccatgcgatactccctcttggctggaggcaagagagtgcgacccattctgtgtatcgccgcatgcgagcttgtcggtggttctgaagagttggccatgcccaccgcatgtgccatggaaatcattcacaccatgttcctcattcacgacgacctcccttgtatcgacaacgacgacctgcgacgtggcaagcccacaaaccacaaggtgttcggagagggaaccgccgtcctggccggtgacgccctcctgagttttgcctttgaacatattgccgtctcgacctctaagactgttgagagtgaccgggtgctgcgcgttgtctctgagcttggccgagcaattggtagcgagggcgtggcgggaggccaggtagccgacattacctcccaaggcaacccatctgtcggactcgagacgctcgagtggatccacatccacaagactgccgtattacttgagtgttcggtggcaagcggcgctataatcggaggagcttctgacgacgagatcgagcgagtgcgaaaatacgctcggtgtgtaggcctcctgtttcaggtagtggacgacattctggacgttacaaagtctagtgaggagctcggcaagacggccgcaaaagacttgctgtctgacaaagccacctaccccaaactcatgggactggaaaaagccaaggagttcgcagatgagcttctgggtaaggctaaggaggagctgtcttttttcaacccgactaaggccgctcctctgctgggactggctgactacatcgcccagagacagaac

SEQ ID NO: 864 - DNA, 957 bp, Picea abies
atgctccggtgtagtaatacgaacgctcagctggccaacctgtcagagcaggtgaagggaaaggttactgagtttgacttcaaggagtacatgcgctctaaggccatgtccgtcaacgaggcactcgaccgcgctgtcccacttcgatacccagagaagatccacgaggcaatgcggtatagtcttctcgcaggcggaaagagggtgcgacccatcctctgtatcgccgcatgcgagcttgtcggagggtctgaggagctggccatgcccaccgcttgcgcgatggagatcatccacaccatgagcctcatccatgatgaccttccatgtattgataatgatgatctgcggcgtggtaagcccaccaaccacaaggtgtttggtgagggcacagccgtccttgccggagatgcactgctttcttttgcttttgagcacatcgctgtctcgacctctaagactgtggagtcggaccgcgtccttcgtgttgtatctgagcttggccgagctatcggctccgagggcgtggccgggggtcaggtggccgatattacaagccagggcaaccctagcgtgggtttggagaccctagagtggatccacattcataagaccgccgttctgctcgagtgctctgttgcctctggggccattatcggtggcgcctctgacgacgagatcgaacgggtaagaaagtatgctagatgtgtaggtttgttgttccaggttgtggatgacatcctggacgttactaagtcatctgaagaattgggtaaaacagccgctaaggaccttctctctgacaaggctacgtatccaaaactgatgggcctcgagaaagccaaggagtttgctgatgagcttttgggcaaggcaaaggaggagctgtcgttcttcaaccccaccaaggccgcccctctattgggactcgctgactatatcgcccagaggcagaac

SEQ ID NO: 865 - DNA, 957 bp, Picea abies
atgctgcgatgctcaaacacgaacgcccaactggctaacctgtccgagcaggtaaagggcaaggtcactgaatttgacttcaaagagtacatgcgatccaaggctatgtccgttaacgaggctctcgatcgagctgtccctctccgttacccagaaaaaatacatgaggccatgcgatactccctgctggccggcgggaagagagttcgacccattctgtgcatcgccgcttgcgagctcgtgggaggctctgaggagctcgctatgccgaccgcctgcgccatggaaattatccacaccatgtcactgatccatgacgatctgccccctatggacaatgacgacttccgacggggtaagcccacaaaccataaagtctttggcgaaggtactgctgtgctggcaggtgacgctctgttgtccttcgccttcgagcacatcgccgtgtcaacttccaagaccgtggagagcgatcgtgttcttcgcgtcgtttctgagcttggccgagcgatcggttcggaaggcgttgctggtggacaggtggctgatataacctctcagggcaatccctcggtcggacttgagacactcgagtggattcacatacataagactgccgtcctcctggaatgttccgtcgcctccggagccatcattggcggcgctagtgatgatgaaatagagcgggtcagaaaatatgcacgatgtgtcggactgctttttcaggtcgtcgacgacattctggacgtgaccaaaagctccgaggaactcggcaaaactgccgcgaaggacctgctgtctgataaggcaacctacccaaagctcatgggactggaaaaggccaaggagttcgcggacgagctcttgggaaaggccaaggaagagctaagcttcttcaaccccactaaggctgctccactcctgggcctcgctgattatatcgcccaacgacagaac

SEQ ID NO: 866 - DNA, 1059 bp, Sus scrofa
atgaacggagaccagaagctggatgcctacgccagggagcggcaggactttattcagcatttttcccaaatcgttaaggttctcacagaggaagacattggacatccggagattggtgatgccgtggctcgcctcaaagaggtgcttgaatataacgtcgtcggtggaaagtataatcggggaattactgtgctggtcgtattccgggagctggtcgagcctcgaaagcaggatgcagactccctgcagagagctttgaccgttggctggtgcatagagctgctgcaggccttttggcttgtggctgacgacattgaagattcctcccttacgcggcgcgggcagacctgttggtaccgaaagcccggcattggcttggacgcaatttgggacgctttcctcctggaagcctgcatctaccgtctcctgaagttctactgccgagagcaaccttattacctcaacttaatcgagctgttccttcagacttcttataacactgagatcggacagacactcgatttgatcgccggaccccaagggaacgttgacttatcgcgattcactgagaagcgatataagtccattgtcaagtacaagaccgccttttactcgttttacctcccggtggccgcagccatgtacatggccggtatagatggcgagaaggagcatgcgaacgccaagaagatcctgatggaaatgggcgaattcttccaaatccaagacgattacctcgaccttttcggcgaccctagtgttaccggtaagattggaaccgacatccaagacaacaagtgcagctggctagttgtccagtgtctccagcgagcctcgcctgaacagcgacagattctgcaagaaaattacggacagaaggacgctgagaaggttgctcgtgtgaaggctctatacgaggaaatgaacctgcaggccgtttttctccagtatgaggaggattcctactctcacttgatgggtctaatcgagcagtacgcagcaccgttgccccctgcgatcttcctggaacttgctcacaagatttataagcgacgaaag

SEQ ID NO: 867 - DNA, 879 bp, Staphylococcus aureus
atgaccaacctcccaatgaataagttgattgacgaggtcaataacgagctttcagtcgctattaacaagtcggtaatggacacccaactggaggagtccatgctgtactcactgaacgccgggggtaagcgaattaggcctgtcctactcctgctgacgttagactcactcaatacagagtacgagttgggcatgaagtcagcgatcgctctcgagatgatccatacctactttctgattcacgacgatctcccctgtatcgacaacgacgactaccgtcgaggaaagctcaccaaccataaggtgtacggcgagtggacagccattctcgcaggcgacgcgctgctcaccaaggctttcgagctgatttcctctgatgaccggctcactgacgaggtgaagattaaggtcttgcaacgactaagtatagcctcgggacacgttggcatggtggggggacagatgttggacatgcagtctgagggacagcctattgatctggagaccctggagatgatccataagaccaaaaccggcgccctactcaccttcgcagttatgtccgctgccgacatcgcgaacgtggatgacacaactaaggagcacctggagagctacagttatcacctcggaatgatgttccagatcaaggacgatctgctggactgttacggagatgaagccaagcttggcaagaaggtcgggtcggacctggagaacaacaagtctacttatgttagcctgctcggtaaggatggagccgaagacaagttgacataccatcgagatgctgccgtcgacgagttgacccaaattgatgagcagtttaacaccaagcacctacttgaaattgtggatctgttctactcccgagaccac

SEQ ID NO: 868 - DNA, 879 bp, Staphylococcus aureus
atgaccaacctaccgatgaataagcttattgacgaggtgaataatgagctgtccgtcgccatcaacaagagcgtcatggacacccagctcgaagagtctatgctgtattctcttaacgctggtggtaaacgaattcgacccgtgctgctgctcctcaccctggacagcctgaacaccgagtacgagttgggaatgaagagtgccattgccctggagatgattcacacctactctctcattcatgacgacctgcccgcgatggataacgatgactatcggcggggaaaactgaccaaccacaaagtatacggcgagtggacggcgattctcgcgggtgatgccttgctcaccaaggccttcgagctcatctcgtctgacgaccggcttaccgacgaagttaagatcaaggtgctgcagcggctgtcgatagcttccggtcacgtgggaatggtaggaggccagatgctcgacatgcagtctgaaggacagcctatcgatttggagacgctggaaatgatccataagacaaaaaccggagcactgtttacctttgccgttatgtccgccgctgacattgcgaatgtggacgacaccacgaaggagcatttggaatcttatagctatcacctcggaatgatgtttcagattaaggacgacctgctggactgttacggagacgaggctaagcttggcaaaaaggtcggttccgacttggagaataacaaatccacctacgtttcgctgctgggcaaggatggggctgaggacaagcttacctaccacagagacgcagccgtggatgagctgacccagattgacgagcagtttaacaccaaacatctgctggagatcgtggacctcttctactctcgagatcat

SEQ ID NO: 869 - DNA, 879 bp, Staphylococcus aureus
atgactaacttgcctatgaacaagctcattgacgaagtcaacaacgagctgtccgttgccatcaacaagagcgtgatggacacacagctggaggagtctatgctgtattctttgaacgccggtggcaagcggattcgtcccgtgctcctcctccttactctggatagcctgaacacagaatacgaactgggcatgaagtcagccatcgccttggagatgatccatacatactcgctgattcatgatgatctcccgtgtattgacaacgatgactatcgtcggggcaagttaactaaccacaaggtctatggtgaatggacggcaattctggcaggtgacgctctactaaccaaggcctttgagctcattagcagcgacgacaggttgacggacgaggtcaagatcaaggtgctgcagagactctctattgcttctggacacgtcggcatggtgggcggccaaatgctcgacatgcagtctgaaggacagcccattgacttggaaaccctcgaaatgatccataaaaccaagacgggtgccttgctgactttcgccgtcatgtcggccgccgacatcgctaacgtcgacgataccacaaaggagcacctggagtcttactcttatcaccttggaatgatgttccagatcaaggatgatctgctggattgctacggagatgaggcgaagcttggaaagaaagtcggttctgatcttgagaacaacaagtccacctacgtgagcctgcttggcaaggacggcgccgaggataagttgacctaccatagggacgccgctgtggacgaattgacgcaaatcgacgagcagttcaacacaaagcaccttctcgagatcgttgatttgttctattccagagaccat

SEQ ID NO: 870 - DNA, 891 bp, Geobacillus sp. WSUCF1
atggcacaactctcagtcgagcagttcctgaacgagcagaaaagagctgtggaggccgctctctccagctacatggcccgactgcgaggccctgaaactcttaagaaggccatggcctatagcctggaggctggtggaaagcgtatcagacccctgctcctcctggctacaattcaggctctgggtaaggaccctgccatcggactacccgtggcctgtgcaatcgagatgattcacacctatttccttatccatgacgaccttccttcgatggacaacgacgacctgcgccgaggaaagccaaccaaccataaggttttcggtgaggctatggccattctggctggagacgcgctgctgacctatgcctttcagctcattgcagaggtggacgacgacagagtgcctccgtccgttcgactacagctgatcgaacaactcgccaaagctgccggacccgaaggaatggtcgctggacaggcggccgacatggaggccgagggcaagaccctggctcttgccgaactcgagtacattcacagacacaagactggaaaaatgcttcaatattccgttcacgctggcgctctgttgggcggcgccgatggaagacagacacgagagctcaacgagtttgcagctcatctaggcctagcattccagattcgagatgacattctcgatattgagggaatggaggagaagatcggtaagagagtaggtagcgaccgtgataataagaaggccacctatcccgtgctactgtccctaggtggcgccaaggaaaagctggcctttcatatcgacgctgctaaacgacatcttcagcaggcgaagatagacgatgccgttctggcgtacatttgcgaactggtggccgtccgagaccat

SEQ ID NO: 871 - DNA, 1062 bp, Saccharomyces cerevisiae
atggcgtcggagaaggaaatacgccgagagcgcttcttgaacgtgttccctaagctcgtggaagagctcaacgcctcgctcctggcctacggtatgcctaaggaagcgtgtgattggtacgcccattctctcaactacaacactcctggagggaagctcaaccgcggattgtcggtcgtcgacacctacgctattctctccaacaagaccgttgagcagttgggccaggaagagtacgaaaaagtggccatccttggatggtgtatcgagctgctccaggcttacttcctggttgccgatgacatgccgtgtatcgataagtcaatcacaagaagaggacagccctgctggtacaaggtgcccgaggtcggtgaaattgcgatcaatgatgcgttcatgctggaggctgctatctacaagctgctgaagtcccattttcgaaacgaaaagtactacatcgacatcacagagctgttccatgaagtcacattccagacagaactgggacagctgatggacctcatcacagcgcccgaggataaggtggacctatcaaagttttcactcaagaagcactccttcattgtgaccttcaagacggcctattacagcttctacctgcccgtggctctggccatgtacgttgccggtatcactgacgagaaggatctgaagcaggcccgagatgttctcatccccctgggcgaatactttcagatccaggacgactatctggactgctttggcacaccagagcagattggcaagatcggtactgatattcaggacaacaagtgttcgtgggtcattaacaaggcactcgagctggcttcagcggagcagcggaagacactggacgagaactacggcaagaaggattcagttgccgaggcaaagtgtaaaaaaatctttaacgacctgaagattgagcagctataccatgagtacgaggagtctatcgctaaggatcttaaggctaagatttctcaagtcgatgaatctcgaggcttcaaagcagatgtgctgacagctttcttgaacaaggtgtacaagagatccaag

SEQ ID NO: 872 - DNA, 1047 bp, Neosartorya fumigata
atggccaccaccacctcccgagcggcgtttgaggccgtctttcccaccctggctgaggatctgctggcacacgcgaagaagtataacttgccagagaacgccgtcaaatggttcgaacaggtgctgaacgttaatgtgccaggaggtaagctgaacagaggactaagtgttcccgacacgggaatcgcgctccttcagaagccgctgaccgacgagcagttcaagcacctgtcgattctgggttggctgacggaacttctgcaagcattctttctcgtctctgacgacatgccctgtattgactcttctattactcgtagaggacagccctgttggtacagacaccccggtgtcggactgattgcgattaacgatgcttttatgctggagtcgggcatctacgtgatcctgaagaagcactttcggtcccaccccgcttacgtggacttcctggagctctttcatgagaccacttggcaaacagagctgggccagctgtgcgacctcattacggcaccggaggacaaggtagatctcgataactttagtatggaaaaatacatgtttatcgtgacgtacaagactgcttactattcattctacctccctgtcgcgctggcgctcctctacctggaacttgccacccccgagaatttacagcagacccacgacatcctgatcccattgggtcagtacttccaggtgcaggacgactatctggatgcatacggcgaccccgcagttattggaaagattggcaccgacattcaggataataagtgttcctggttgatcaaccaggcccttcagcgatgtaacaccgagcaacgaaagcttttggatactgcctacggacgtaaagactccgaattggaggccaaggttaaggccctgtataaggagctcgatcttgagaaggtctataaggagtacgaggagaagactgtcggagaaatccgtcgaaagattgctgccattgacgagtcgcagggacttaagaaggaggtcttcgaggccttcctcgggaagatttacaagcggactaag

SEQ ID NO: 873 - DNA, 1095 bp, Catharanthus roseus
atgtgcgtgagttccgccctggccaacgtcggccagcaggtgcaacggcaatccaactcggtcgccgaggagccactggaccccttcagcttggtcgccgacgaactgtctatacttgctaaccggctccgatccatggtggtagccgaagtccctaagctggcctcggcagccgaatatttctttaagttgggggtggagggtaagcgatttcgaccaaccgtcctcctgctcatggccacagctattgacgctcccatttcgcgaacccctccagacaccagtctagacacactgtccacggagctgagactccgacaacagtcgattgctgagattactgaaatgatccatgttgctttcttactgcatgacgacgtgcttgacgacgccgagacccgacgaggtatcggctccctcaacttcgtgatgggaaacaagctggctgtgctggcaggagactttctactctctagagcatgcgtagctctcgcgtcactaaagaatactgaggtcgtgtcgttgctagccactgtcgtggagcatctcgtgacaggagagactatgcaaatgacgacaacttccgaccagaggtgttcgatggagtactacatgcagaagacctactacaagactgccagtttgatttcgaactcctgcaaggccattgccctactggctggccagacctctgaggtggccatgttggcatatgagtatggaaaaaacctcggactcgcattccagctcattgacgacgtcctggactttactggaacttcggcatctctgggtaagggatctttatccgatatccgacacggcattgtgactgcaccaatcctgtttgctatcgaagagttccctgagcttagggctgtcgtagacgaaggcttcgaaaacccctataatgttgatctcgctctccattacctgggcaaatctcggggcatccagcgaactagagagctcgctattaagcatgccaacctagcttctgacgctattgactcgcttcccgtgactgatgatgaacacgtgctacgatcgcgacgggccctggttgagctgactcaacgagtaatcacccggcga

SEQ ID NO: 874 - DNA, 1101 bp, Catharanthus roseus
atgtgcgtttcttcggctcttgcgaacgtgggccagcaggtgcagcgacagtctaattctgtggccgaggagccattggatcctttctcgctggtagccgacgagttgtctatattagctaaccgactccgatccatggtggttgctgaggttcctaagctggcctctgcagccgagtacttttttaagctgggcgtagagggcaagagattccgccccacggtactgttgctcatggctaccgctattgacgcaccaatctcgcgaaccccgcccgacacatccttagacactctcagcacggaattgcgattgcggcagcaatctattgccgagattaccgaaatgattcatgtggcattcctgctccatgacgacgttccttgcatcgatgacgcagaaaccagaagaggcatcggttcgcttaactttgtgatgggcaacaagcttgctgttttggccggcgactttctactgtcccgagcgtgtgttgctctcgcaagcttaaagaacacagaagtcgtgagcttattggctacagtcgtcgagcacctggtcactggtgagactatgcagatgaccaccacttctgatcaacgttgttctatggaatactacatgcagaagacttactataagactgcctccctaatctccaacagttgcaaggcaatcgctctgctagccggtcagacctctgaggtcgccatgctcgcttacgagtacggtaaaaacctaggcttggcctttcagcttatagacgacgtcctggactttactggaacatcagcttccttaggcaagggctcgctctctgatatccgacacggtatcgtgaccgcgcccatcctgttcgccattgaggagttccccgagcttcgcgccgtagttgatgaaggattcgagaacccctataatgtcgatctggcgctgcactacctcggaaaaagccgtggaatccagcgaacgagagagctcgccatcaagcacgccaacttggcttctgatgctattgattctcttcctgttaccgatgacgagcatgtgctcagatcccggcgggctcttgttgagctgacacaacgagttattacccgtcga

SEQ ID NO: 875 - DNA, 1101 bp, Catharanthus roseus
atgtgcgtttcctctgcccttgccaacgtcggacagcaggttcagcgccagtccaactctgtcgctgaagagcctctggatccgtttagcttggtggcagatgaattatcgatcctcgccaacaggctgcgatctatggtggtggctgaagtgcccaagttggctagtgcagccgagtactttttcaagttgggtgtggaaggaaagcgattccgacccaccgtgctattgctcatggctacagctatcgacgctccaatttctcgaactccgcccgacacatcactggacaccctgtctactgagctacgactgcgacagcagtctattgcagagattaccgaaatgattcacgtagcctccctattgcatgatgacgtcccttgtattgatgatgccgagacccgacgaggaattggcagtctgaattttgtcatgggaaacaagcttgccgtcctggccggagatttcttgctttctcgagcctgtgtggctttggcttccctgaagaacaccgaagtggtatcacttcttgctactgtcgtggagcatttggttaccggggaaaccatgcagatgaccaccacttcagaccagcgatgttccatggaatactacatgcagaagacttactataagactgcttcgcttatctcgaactcttgcaaagctattgcccttttagccggacagacctctgaggtggccatgctcgcatacgagtacggaaaaaacttgggactagcattccaattgattgatgatgtgctggacttcacgggcacttccgcctctttgggaaagggctcgcttagcgatatacgtcacggtatcgtcacagcccctatcctgtttgctatcgaggagttcccggagctgcgagccgtggtcgatgagggattcgagaacccttacaacgtggacctggctctccattaccttggtaagtccagaggaatccagcgaacacgagagcttgccattaagcacgctaaccttgcgtcagacgccattgattccctccccgtaacggacgacgagcatgtccttcgatctagacgtgccctggtcgagctgacccagcgtgttatcactcgacga

SEQ ID NO: 876 - DNA, 912 bp, Rhizobium acidisoli
atggacgctaatcgtgacacctttgagacacgactgaagaacaatgcacgggagatcgaggcgctgctggatgccctcctcctgccgaacgctctgtctgacgaaattgctcgacctgagaccctgcgatctgctatgcattacgcggtactcaacggcggtaagagactccgacccttcctggtggtcgagtcagccgctctactgggcggcgacgatgaggccgctcgacgggtgggcgctgctctcgagtgtgtccattgctactttctcgtgcatgacgacctccctgccatggatgatgacgaccttcgacgtggcaaacccactgtccacattaagtttgacgaagccaccgcgatcttggccggagactctctcctgacgtacgcttttgatatcattgccgcccccgagaccgccttggctgatacgtcgaaggcttccctagttcttgccctggctcgagcggccggcctggggggcatggctggaggtcaggccctggatctggctgctgagaagcaagcccctgatgaggcgggcattatccgtcttcaggctatgaagacgggagccctgatccgattcgcttgcgaggctggcgcgctcatcgctgcttctccccccgaagacagacgacgtctgcgagcgttcggcgaaaagatcggactggcctttcagctggcggatgacatccttgatttgacctcagatactgctaccatgggaaaggccacaggcaaggacgccgcacgaggaaagggcactctggttgcgctgcatgggattgagtgggccgaagagcagcttagacaacacgtgcgtgacgccgaggctcttcttgcgccctacggcgctcgtgcttctactctgattgcggctgctcatttcattgctgatcgaaagtcc

SEQ ID NO: 877 - DNA, 897 bp, Escherichia coli
atggacttccctcagcagctggaggcctgtgttaaacaggctaaccaggccctttcgagattcattgcacctctgccatttcagaacaccccagttgtcgagactatgcagtacggggcgctcttgggtgggaagcgactacggccatttctggtttacgccaccggtcatatgttcggcgtgtccaccaatacactggacgctccagcagctgctgtggaatgtattcacgcctacttcctgatccacgacgatttacccgccatggatgacgacgacctccggcgaggcctccccacttgtcacgttaaattcggcgaggccaacgctatactggcgggagatgcgctgcaaacccttgctttttcgatcctgtccgatgcggacatgcctgaagtctctgatcgtgaccgaatctccatgatctctgagcttgccagtgcgtcaggtattgcaggcatgtgcggtggccaggctttggacttggatgcggagggcaagcacgttcccttggatgctctcgagcgaatccaccgccataagaccggtgcccttatccgagccgcggtccgactgggagcactaagcgccggcgacaagggtcggcgagctttgcccgtcctggataagtacgctgagtccatcgggctcgcgttccaggtccaagacgatatcctagacgttgttggagacaccgccactctcggcaagagacagggagccgaccaacaattgggaaaatccacctacccagctctgctgggtctcgagcaagcccgaaagaaggcacgcgaccttatcgatgatgctcgccagtcgcttaagcagctggcagagcagtcccttgacacttctgccctagaggcccttgctgactacatcatccaacgaaacaag

SEQ ID NO: 878 - DNA, 912 bp, Brucella suis
atggagaagctccctgtggactttacgacgttacttaatcggcgagccatggaggtcgaagccgccctggctggactgctcgatgagtgcccccgaacaggcgagatcgctagacctcagcggttgattgcggccatgcgacacggcgtgctgaatggtggaaagcgtctccggccctttctagtgctggagtctgccgctctttttggtcagtatggtcaggctgtgttacgagtagccgctgccctagagtgtatccactgctacttcctggtccacgacgacctgcctgccatggacgacgacgacttgagacgagggcagcctaccgtccataaggctttcgacgaggctgccgccatccttgcaggagactccctgctgacttacgctttcgacatcatagcttctgacgaaaccgagctggacgccacaacccgaatcaagctggtctgtgctttgactcgggcctcgggcctaggcggaatggcgggcggccaagccctcgacctgatggctgagaccagaaagcccgacgaagccggaatcatcacactgcaggctatgaagacgggagccctcatcagattcgcttgtgaggccggtgctatcatcgccggcgcttctcaagaggacagagaacgcatggcggagtttggctccgcgattggactcgctttccagttggcggacgacttgctggatgtaaccgcagacgccggaaccatgggaaaggccaccggaaaggacgcggctgccggtaaggccactctcgtttctctccacggaatcgactggactaggcagcagctatcgggcctggtcgctcaagcggagagcctcctagctccattcggagaggacgccgagccgctgaaacaggctgcccgatttatcgccgaacgacaaaac

SEQ ID NO: 879 - DNA, 1017 bp, Arabidopsis thaliana
atgttttcgctggtggccgacgagctgtcgcttctgagcaacaagcttcgagaaatggtcctggccgaggtgccgaagttggctagtgctgccgagtactttttcaagagaggcgtccagggtaagcagtttcgaagcactatcttgcttcttatggccacagccctgaatgtacgggtgccagaggccttgatcggcgagtccacagacattgtgacctccgagctacgagttcgacagcgaggcattgcggagatcaccgagatgattcatgttgcctttcttcttcacgacgacgttctcgacgatgccgatacgcgacgaggtgtgggttcccttaacgtcgtcatggggaacaagatgtccgtcctggccggagatttcctcctgagcagagcctgtggagcactggcggccttgaagaacaccgaggtggtggctctgctggctaccgcggtagagcacctggtaacgggagaaaccatggagattacctcctctaccgagcagcggtactctatggactactacatgcagaagacctattacaagactgccagtctaatttcaaacagctgtaaggctgtggctgttctcaccggacaaaccgcagaagttgcagtgctcgcattcgagtacggtcggaatctcggcctggcctttcagctcattgacgacatactggactttaccggcacctcggcctcgttaggcaagggctctttgtctgatattcggcatggcgttatcactgctccgatcctcttcgccatggaggaattcccgcagctccgggaagtggtggaccaggtggagaaggatcccagaaacgtggacatcgctctggaatacctcggcaagtcgaagggcatccagcgagccagggaactggcgatggagcacgccaaccttgccgccgctgccattggctctctccctgaaacagacaacgaggatgtaaagcgctcccggagagctctgatcgatctcactcaccgcgtgatcacgcgaaacaag

SEQ ID NO: 880 - DNA, 1023 bp, Arabidopsis thaliana
atgttttcactggtggccgacgagctctcgctcctgtctaataagctccgagagatggtcctggctgaggtccccaagcttgcctcggcggctgagtatttcttcaagcgaggcgtccagggcaagcagtttagatctacaattctgcttctgatggctaccgctctgaacgtccgagtccccgaggctctcatcggagaaagcaccgacatcgtgacctccgaactccgagtgcggcagcgtggcattgctgagatcactgagatgattcacgtcgcttttctgctgcatgacgacgtcccctgtattgacgacgccgatactcgacgtggagtcggcagcctaaatgtcgtaatgggcaataagatgtctgtactcgcgggagacttccttctgtctcgagcgtgcggtgccttggccgccctgaagaacaccgaggtggttgcgctcctagcgacggctgttgagcacttggtcactggagagactatggaaattacatcttccacagagcagcgatactcaatggactactacatgcaaaagacctattataagaccgcatcgctgatctccaacagctgtaaggcggtggcagtcctgaccggtcagaccgccgaggttgctgtgctggctttcgaatatggtagaaacctgggactggcatttcaactgattgacgacattctagattttacgggtacctcagcctctctgggaaaaggcagcttgagtgatattcggcacggtgtcattacggcccccatcctgtttgctatggaggagtttccacagctgcgagaagtggttgaccaagtggagaaggacccacgaaatgtagacatcgcgctcgagtacctgggaaagtctaagggcatccagcgagcgcgggagttggccatggaacacgccaaccttgcagccgccgctattggttcccttcccgagaccgacaatgaggacgtgaagcgatcgcgacgcgccctgattgatctgacccaccgcgtcattactcgtaacaaa

SEQ ID NO: 881 - DNA, 1023 bp, Arabidopsis thaliana
atgttttctctggtcgctgatgaactgtccttgctcagtaacaagcttagagaaatggtgctcgctgaggttccgaagttggccagcgccgctgagtacttttttaagcgaggcgtgcagggaaagcagttccgatccacaattctcctgctgatggcaacagcgctgaacgttcgagtccccgaggctctcatcggcgagagtacggacatcgtgacttctgagctgcgagttaggcagaggggaatcgcagagatcaccgaaatgattcacgtcgccagcctgcttcatgacgatgtcccttgcatagatgatgccgacacacgaagaggagtcggatccctcaacgttgtgatgggtaataagatgtcggtccttgcgggagactttctgctgtctagagcttgtggtgctttggcagcgctgaagaacactgaggttgtcgccctgctcgccaccgcagtcgagcatctcgtcacgggcgagacaatggaaattacgtcatctactgagcaaagatacagtatggattactacatgcagaagacctattacaaaacagcatcacttatctctaactcctgcaaggccgtggccgtgctgacaggacagaccgccgaggtggccgttctggcttttgagtacggacgaaatctagggctcgcttttcagctgatcgacgatattcttgactttacgggaacctctgcttctctgggaaagggaagcctcagcgatattcgacacggagtcatcactgctccaatcttgttcgctatggaggagttcccccagttgagagaggtcgtggaccaggtcgagaaagacccacgaaacgtcgacattgctttggagtacctgggcaagagcaagggcatccagagagcccgagagctcgcaatggagcacgcgaacctcgctgctgcagctattggatctctgccagagaccgacaacgaagacgtcaagcgatcgcgaagggctctgattgacctcactcatcgagtcatcacccgaaacaag

SEQ ID NO: 882 - DNA, 846 bp, Buchnera aphidicola
atgcacttcttccacctatacgagcgatacaagcaccgaatcaatcagaagctcttctacacattgaatcagcttcccttccagaagagctccctgctcaaagcaatgaagtactctgttttctctggatccaaaagacttcggtccagcttgatttattctacgggcgacgtgttcaaggtgaacatcactaccctcgacgtcatctcgaccgccatcgaattcatccattcttactttctgatccacgatgacctcccctgcatggataacgacaacttccgtcgaggcaagatctcttgtcacgtaaagtatggcgaatctacctcgctgctcgccggtgacgctctacagagcctggcttttaacatactttcaaactcatttatgcccaacgtgtctaacctgaagcgcattaagatgatctcggagctgtcctactccattggatcttccgggatgtgtatgggccagaacctggaccttgaggccgagaagaaggatgtcaacctctccgaattggagattattaacctgtacaaaacgtctttcctgatgcgttctgctgtgagactggtgtatttttcctccaacaacttcagtaagtctattctgtcgattctcgatctgttctctatctctattggcctagctttccagatccaggacgacatcctggatttcaaaaaggacagcgttaagactgataacaagaagatcattaagaagcacacctaccccctgattattggactggacgagtcacgcaaaaagattaagcaactgcataagaagtcttttctcgccctgaattcgttgaagaagaagatctctatcccgacctac

SEQ ID NO: 883 - DNA, 1071 bp, Dendroctonus ponderosae
atgatccgacccgttcagtcgtccgccctggtcacaaaagagcagtctcgagacttcatggccctgttcccggacctcgtccgcgaactgactgaagtgggcaagtcgcaggagttgcctgacgtcatgcgaagattcgcccgagtgctccagtacaatacccccaccggaaagaagaatcggggacttatcgttttgtctacctaccgaatgcttgaggatccagagaagctcactcccgagaatattcggctggcctctatcctaggatggtgtgtcgagatggtccacgcttatttcctcatcctggatgacattccgtgcatcgatggctcagagacacgaaggggcgccctctgctggttccgacagtcaggtattggccttactgcagtcaacgacgccgtgatgatcgagaacgccgtttacttgctgatcaaacgacatctcaaagaccatcccatgtacgtccccctcatggagctttttcacgagggaaacctgaagactacccttggccagtctcttgatgctatgtgtctggacacaaatggtaagcctaagcttgacatgttcacaatgtcccgatacacgtctatagtgaagtataagactgccttctactcgtttcagatgcccgtcgccatcgccatgtacctggctggaatgagcgacgaagagcagcaccgacaggcaaaaactattctcatggagatgggtcagttcttccagattcaagacgacttcctggattgtttcggagaccctacagtcactggaaaggtgggcacggatatccaggacggcaaatgctcttggcttgcagtggtcgctctccagagggcctcccccgcccaaagaaaaatcatggaggagcactacggtaggcctgagcccgagtcgattgcccgaattaagaatctgtacgtcgatctgtgtctccctaacacctatgccatttatgaggaggaaagtttcaatatcattaagacccacatccaacaaatttcaaagggtcttagacatgacctgttctttaagattatggaaaaaatttacaagcgagagtgt

SEQ ID NO: 884 - DNA, 942 bp, Picea abies
atgaaggccctggttcagctcgctgacctttcagagcaggtgaagaacgtggtggagtttgacttcgacaaatacatgcactccaaggctatcgcggtcaatgaggccctggataaggtcattcccccccgttatccgcagaaaatctacgagtccatgagatactctcttcttgccggaggcaagcgggtgcgacccattctctgcattgcggcgtgcgagctgatgggcggaacagaagaattggccatgccgaccgcctgtgccattgaaatgattcacaccatgtttttaattcacgatgatctgccgtacatcgacaacgacgatcttagacgaggaaaacccactaaccacaaggtcttcggcgaggacactgccattattgctggtgatgctctgcttagcctggcattcgagcatgttgccgtaagtacctctaggacgctgggaaccgacattattctccgtttgctgtctgaaatcggccgagcaaccggttcggagggtgttatgggtggacaagtggttgatatagaatctgagggcgaccccagcattgacctggaaacactggagtgggtccacatccacaagactgccgtactcctggaatgctcggtcgtgtgcggcgccattatgggcggggcttcggaggacgacattgagcgagcccgacgatacgcacggtgtgtcggcctgcttttccaggtggttgacgacatcctggacgtgtctcagtcgtcggaggagctcggtaagactgccggaaaggacctaatttctgataaggcgacttatcctaaattgatgggactggagaaggctaaggagttcgcagacgagcttctcaatcgagggaagcaggagctaagctgtttcgacccgacgaaggctgctcccctcttcgccctcgcagactacatcgcctctaggcaaaac

SEQ ID NO: 885 - DNA, 900 bp, Abies grandis
atgaaggccgttgagttcgacttcaacaagtatatggactctaaggccatgaccgttaacgaggccctgaacaaggccattcccttgcgttacccccagaagatctacgaatcgatgcggtactccctgttggccggtggcaagcgggtgcgccccgtcctgtgcattgccgcttgcgagttggtgggcggcactgaagagctcgcaattcctactgcatgcgctattgaaatgatacacactatgtttctcatgcatgacgatcttccttgcattgataatgacgatcttcgacggggtaagccgactaaccacaagattttcggtgaagacaccgctgttacagctggtaacgcccttcactcttacgcctttgagcacatcgccgtatcgacttccaagacagtcggcgcggatcgaatattgcggatggtttccgaacttggacgagccaccggaagcgaaggtgtgatgggaggtcagatggtcgatattgcttcagagggtgacccttctatcgaccttcaaactctcgaatggatccacatccacaagaccgcaatgctgctggagtgttctgttgtctgtggcgctattatcggaggcgccagtgaaatcgtgattgaacgcgcccgcagatacgcgcgatgcgtgggtcttctcttccaggtcgttgatgatatccttgatgttactaagtcgagcgacgagctgggtaagacggccggtaaggacctgatctctgacaaggctacttacccgaagctgatgggactcgagaaagccaaggagttttccgacgagcttctcaaccgcgctaagggtgagctctcatgctttgatccagtcaaggcagctccactgctgggtcttgctgactacgtggcattccgtcagaat

SEQ ID NO: 886 - DNA, 1119 bp, Corynebacterium glutamicum
atgaaagatgtgtcgctctcttctttcgacgcccatgacctggatctcgataagtttcctgaagtggttcgggatagactcactcagtttctcgacgctcaggaactgacgatcgctgacattggagctccggtcactgacgccgttgcacacttgcgaagtttcgtgctgaacggaggcaagcgaattagaccgctctacgcatgggcgggatttctagcagcgcaagggcataagaattcttccgaaaagcttgagtctgtgctcgacgccgcagcttcactggaattcattcaggcctgtgccctgatacacgacgatatcccatgcatcgactcttcggatacccggcgaggcgcgcccacggtgcaccgagccgtggaggcggaccaccgagccaacaacttcgaaggcgaccctgaacatttcggcgtgtctgtttccatcctcgctggtgacatggccctggtgtgggctgaggatatgttacaggactccggcctgtcggctgaggcgttggcacgaacacgtgacgcttggagaggcatgcgaaccgaggttattggaggccagttgctcgacatctatcttgaatctcacgccaacgagtccgtggagcttgcagactccgtcaaccggtttaaaactgcagcctacacaatcgctagacctttgcacctcggcgcatccattgctggcggttcgcctcagctgattgacgctctactccactacggccatgacatcggaatcgccttccagctgcgtgacgatctcctgggcgtattcggagaccccgctattaccggtaagccagcaggtgacgacatccgtgagggcaagcgtactgtgctcctggccctcgcattgcaacgagccgataaacagagtcctgaggccgccaccgctattagagcgggagtcgggaaggttacatcccctgaggacatcgctgtcatcactgagcacatccgagcaaccggcgctgaagaggaggtggagcagcggatatcccagctgacagaatcgggtctcgctcaccttgatgatgtggatatccccgatgaagtccgagcccagctgcgagcactcgccattcgctccacagagcgacgaatg

SEQ ID NO: 887 - DNA, 1041 bp, Vitis vinifera
atgcttgccgaggagcagctggatccgttcagcctggtggccgacgaactatccctgctggcggacagactcagatctatggtcgtggcggaagtgcctaagctcgcttctgctgctgaatactttttcaagatgggcgtggaaggaaagcgtttcagaccgactgtgcttctgcttatggcgaccgcgcttaatgtccctctcccccgacccgccctggccgaagtcccagaaaccctctctaccgaactgcgaacccggcagcagtgcatcgctgagatcaccgagatgatccacgtggctttcttactgcatgatgatgtgcttgacgatgctgagacccgccgagggatcggttccctgaatatcatgatgggtaacaaggtggcagtgttggccggagactttctgttatctcgtgcctgtgtcgccctggccagtctgaagaacactgaagtggtgtccctgttggctacagtggtggagcaccttgttacaggcgagacgatgcagatgacttctacaagcgagcagagagtgtcgatggaatactacctccagaagacctactacaagaccgcatcgctgatctccaactcatgcaaggcgattgcactgttggccggccagaccgctgaggtgagtatgttggctttcgagtacggcaagaatctcgggctggcttttcagctaattgatgacgtccttgattttacaggaacttctgcgtctctgggaaaggggtctctgtcggacattagacacggaatcatcaccgctcccattctcttcgccatcgaggagtttccccagctcgacgccgtcgtgaagcgaggactcgataacccggctgatatcgaccttgctctagattacctgggaaagtcccgaggcatccagcgtactagggagctggccatgaaacacgccaacctggccgccgaagctattgattctctccccgagagcggcgatgaggacgtgctgcgatcccggcgggccctgatcgaccttacccaccgggtcatcacccggacaaag

SEQ ID NO: 888 - DNA, 1047 bp, Vitis vinifera
atgctcgccgaggagcagttggaccctttttctctagtggccgacgagctgtctctcctggccgatcgactgagatcaatggtcgtcgccgaggttccaaagctggcttctgccgccgaatacttcttcaagatgggcgtcgaaggcaagagatttcgtcctacagtgctgttgctcatggccacagctctcaacgtgcccctgccccgccctgctctggcggaggttcctgaaactctgagcacggagctgcgtacccggcagcagtgtatcgctgagatcaccgagatgattcatgttgcttttctccttcatgatgatgtaccctgtattgatgatgcggaaacccgaagaggtattggtagcctcaacatcatgatgggcaataaggtggccgtgctggccggtgatttcctactcagcagagcatgtgtggcgctcgctagcctcaagaacaccgaggtggtctcgctgctggccaccgtcgttgaacacctcgttaccggcgagactatgcagatgacctccacgagtgagcagcgagtttcgatggagtactatctccagaaaacttactacaaaacggcgtcgttgatcagcaactcgtgtaaggcaatcgccctgctcgctggccagaccgctgaggtttcgatgctggcgttcgagtacggcaagaaccttggactggcattccagctgatcgacgacgtcctcgatttcaccggcacaagcgcatccttgggcaagggatccttgtccgatattcgacacggaattatcaccgccccgattctcttcgccatcgaagagttcccacagctcgacgctgtggtgaagcgtggcctggataaccctgccgacatcgatctcgccctggattacctgggcaaatcacgaggcattcaacgcacccgagagctcgccatgaagcacgccaacctggccgcagaagccatcgactctttgcccgaatccggcgacgaggacgtgctgcgctcgaggcgagctctgattgacctgactcatcgcgtgatcacccggacgaaa

SEQ ID NO: 889 - DNA, 1047 bp, Vitis vinifera
atgctggcagaagagcagctggacccattttccctggtggccgacgagctttcgcttctggccgatcgactgcggagcatggttgtcgccgaggtccccaagctggcttctgccgcagaatactttttcaaaatgggagtggagggcaagagatttcgacccacggttctcctgcttatggccacagccctgaacgttcctcttcccagacctgcgctggctgaagtgcctgaaaccctctccaccgagctgagaacccgtcaacagtgtattgccgaaatcaccgagatgatccatgttgcctccttactccacgatgatgtgccttgcattgacgatgcagagacgcgacgaggtatcggatctctcaacatcatgatgggcaacaaggtcgctgttctcgccggagacttcctcctgtcccgggcttgtgtggccctcgcttcgctcaagaacaccgaggttgtctcactgctggctaccgttgtcgagcacttggtcacgggagaaaccatgcagatgacatccacttctgagcagcgagtctccatggagtactacctccaaaaaacatactataagactgcctccctaatctctaactcttgtaaggcgattgcccttcttgctggtcagaccgccgaggtaagtatgttggcatttgagtacggtaaaaacctgggcctggctttccagctcattgacgacgtcctagacttcacaggaacctccgctagcctggggaagggttcgttgagcgatattcgccacggaatcatcactgcccctatcctgttcgctattgaggagtttcctcagctcgacgccgtcgtgaagcgaggacttgataaccccgccgacatcgatctagctctcgattacctgggtaagagccgaggaatccagaggactcgggagctagctatgaaacatgctaacctcgcagccgaggccatcgattccctgcccgagtctggcgacgaggacgtgttgcgctcccgtcgcgctctgatcgatttgacacatcgcgttatcacgcggacaaag

SEQ ID NO: 890 - DNA, 957 bp, Picea abies
atgctccgctgcagcaacactaacgctcagctggctaacctcagcgagcaggtgaagggcaaggtgactgaattcgactttaaggaatatatgcgatccaaagcgatgtccgttaacgaggccctggatcgtgctgtgccgctgcgataccctgagaagattcatgaagctatgcgatactctctcctcgccggcggcaagagagtacggcccattctctgcattgccgcctgtgagcttgtgggaggtagcgaagaattagctatgcccaccgcttgcgctatggaaatcatccatactatgttccttatccatgatgatctgcctcccatggacaacgatgacctccgaagaggaaagcccactaaccataaagtgtttggagaaggcacagccgttttagctggcgatgctctcctctcattcgccttcgagcatattgctgttagtacatccaagaccgtcgaatctgaccgggtcctccgagtggtctcggagctgggaagggctattggctcggagggcgtcgctggcggacaagtcgccgatattactagtcagggcaacccttcggttggactggagaccctcgaatggatccatatccacaaaaccgctgtcctcctggaatgttctgtggcatccggagccatcattggcggagcatccgacgacgagatcgagcgcgtgcgaaagtacgcccgatgcgtgggtcttctatttcaggtggtggacgatatcttggacgtgaccaagtccagcgaggagctgggaaagactgccgctaaggatctccttagcgataaggctacatacccgaagctgatgggactcgagaaggctaaggagttcgcagacgagctgctaggtaaggctaaagaagaactgtcctttttcaaccccaccaaggccgctcctctgctgggcttggctgactacattgctcagcgtcagaac

SEQ ID NO: 891 - DNA, 1065 bp, Sus scrofa
atgaacggcgaccaaaagctggacgcttacgctagagagcgccaggactttattcagcacttctcacagattgttaaggttcttactgaagaggacatcgggcaccctgagattggcgacgctgtagcacggctgaaggaagtgctggagtacaacgttgttggtggtaagtacaaccgcggcatcacagtcctggttgtcttccgagagctagtggagccccgaaaacaagacgctgattccctccagcgagccctgacagtcggttggtgcatcgaactcctgcaggcctttttccttgttgctgatgacatcccctgcatcgactcgagcctgactagacgaggacagacttgttggtaccgtaagcccggcattggccttgacgctattaacgatgccttcctgcttgaggcctgcatttaccgactcctcaaattttattgtcgagagcagccctactacttgaacctgattgagctgttcctccaaacttcctacaacacagagattggtcaaacactcgacctgatcgccggtcctcagggaaacgtggatctgtccagattcaccgagaagagatacaagtctatcgttaagtataaaactgctttctactcattctaccttccggttgccgcagccatgtacatggctggaattgacggcgagaaggaacacgccaacgccaagaagatcctaatggagatgggtgagttctttcagatacaagatgactacttggatctgttcggcgatccttctgtcaccggcaaaatcggtaccgatatccaggacaacaaatgtagttggctagttgttcagtgtctgcaacgagcgagtcctgaacagcgacagatcctgcaggagaactacggccagaaggacgcagaaaaggttgcgagagtaaaagctctttacgaggagatgaaccttcaggcggttttccttcagtatgaagaggactcttactcgcacttgatgggactgatcgagcagtatgcggcccctctcccccccgctattttcctggaattagcccacaagatctacaagcgacggaag

SEQ ID NO: 892 - DNA, 1065 bp, Acyrthosiphon pisum
atgcccgtcattaccgggaccgccgtctccaaggacgagacccgagatttcatggccgtctttcctgacgtggtccgagacctcaccgatacgggtaggaacctcgacgtcccagatgtgaccaagtggctggctaaattgttgcaatacaacgtcccgggtgggaaaaagaaccgaggactggccctggtgctgtcctacaagatgctctcttcccctgcagaccaaacagacgaaaatattagacttagctacattcttggctggtgcgtcgagattctccaggcttaccaactagtgctcgacgacattccctgcatcgataatgcgattactcggcggggtcggccatgttggtaccgacacaacgacataggtctgatggctgtcaacgacggtgttcttctggagcagagcatataccagcttatcaagaagtacttcaaggacaagccttattatacccatattctcgagctgttctacgacgtgaccatgaagacttccatgggtcaatgcctcgacatgctgacggccaactcctttaagtccaagaagctcgagaagtacactatggagaactacacggctattgttaagtacaagacagcttactacagcttctttctccccgtgtgcctcgctatgcgtatgaccaatatcaacgaccccgagattttccgacaggccaaaactattctgcttgagatgggccacttcttccaagtccaggacgactttctggattgctacggtgaccccgacgtgatgggtaagatcgggaccgacattgaggacgggaagtgttcgtggctggcagtggtcgccctccagaaggtgaactctgagcaaaagaagattatggaggacaactacggtatagacaacccagcgaacgtggccgttatcaaggacctctacgctcaattaaagctgcctgacacgttccacttgtacgaggaggaatcttacaaattgatctgcacgcatatccagcaactgtcgcgtggtctatcccaagacatgttcttcaaattcctcgagaagatttacaagcgaacgctc

SEQ ID NO: 893 - DNA, 1077 bp, Mycobacterium tuberculosis
atgcggggtactgacgagaagtacggcctgcctccccaaccagactcggatcgaatgacccgtcgaacattgcctgttttgggcctagctcatgagttgattacgcccacactgcgtcaaatggctgaccggttggacccccatatgcggccagttgtttcgtaccatctgggctggtccgacgagcgcggacgccctgtcaacaacaactgtggcaaggcaattcggcccgccttagtgtttgtggcagccgaggctgccggtgccgatccccattcggcaatcccaggagctgtgtcggtggagttggtccacaacttttttctggttcacgatgacctgatggatagagatgagcaccgtcgccaccggccaaccgtatgggcactctggggcgatgccatggctctgttagctggcgatgctatgttgtctcttgcccacgaagtgctccttgattgtgacagcccccacgtcggcgcagcactgcgtgctatctctgaggccacccgagagctgattagaggacaagctgccgatactgctttcgaatctcgaactgacgtggccctggacgagtgcctgaagatggctgagggtaagacggcggctctgatggccgcttctgctgaggtcggcgcgctgctcgccggagcgccccgatcggttagagaggcgctagtggcttatggacgacatatcggcctggcatttcaactggtcgacgacctgctcggtatttggggacgtcctgaaatcactggtaagcctgtgtattctgacctgcggagcagaaaaaagaccctcccggtaacatggacggtagcccatggaggcctggccggacgtcgactggctgcctggctggtggatgagacagggtcgcagactgcctctgacgacgagcttgcagcagtggccgagctcattgagtgtggaggaggacgaagatgggcctcggctgaggccagaagacatgtcacgcagggaattgacatggtagctcgaattggaattccagacagacctgcagccgagctccaggatttggctcattatatcgttgaccgtcaggcg

SEQ ID NO: 894 - DNA, 1083 bp, Mycobacterium tuberculosis
atgcgaggcactgacgagaagtacggactgcctccccagcctgattctgaccggatgactagacggaccctgcccgtcctgggcttggcacatgagcttatcacccctaccctgcgacaaatggcagaccgattggatccccatatgcgacctgtggtgtcctaccatctgggctggagcgatgaacgaggcagaccggtcaacaacaactgcggaaaggccattcggcccgccctggtcttcgtggctgcagaagccgctggggcagacccgcacagcgccattccgggcgccgtctccgtagagctggttcataacttcttcctagtacatgacgaccttccttgcatcgaccgagacgaacaccggcgacacagacctactgtatgggccttgtggggcgatgcaatggctctgctggcaggagatgctatgctatcgctggctcatgaggtcctgcttgactgcgattcgccacacgtcggcgcagcactgcgcgccatttccgaggcgactcgagagctcattagaggccaggcggccgacactgcctttgagagccgaaccgacgtggcattggacgagtgcctgaaaatggccgagggaaagaccgctgctttaatggccgctagcgctgaagttggcgctctgctcgccggcgctccccgctctgtccgggaggctctggtggcctacggccgacacatcggcctggccttccagctcgtggacgaccttctgggcatctggggacggccagaaatcactggaaagcctgtatacagcgacttgcgatcgcggaagaagactctcccggtgacctggaccgtggctcacggtggcctggcaggtcggcggcttgccgcctggttagtggacgagactggatcacagaccgctagtgacgatgagcttgccgcagtggccgagttgatagagtgcggtggtggccgacgatgggcctccgcggaagccaggcggcacgtgactcaaggcatcgacatggttgcgagaattggcatccctgacagacctgccgcggagctgcaggacctagcgcactacattgtcgaccgccaagcc

SEQ ID NO: 895 - DNA, 1083 bp, Mycobacterium tuberculosis
atgcgaggaaccgacgagaaatacggccttcccccgcaacccgactccgaccgaatgacccgacgaactcttcccgtgctgggcctggctcacgaactcatcaccccaactctgagacagatggccgaccgcctggatccccatatgcgaccagtggtgtcttatcatctgggttggtcggatgagagaggacgacccgtaaacaataactgcggtaaggccattcggcccgcattagtgtttgtggcagcggaggctgctggagctgacccccattccgccattcccggagccgtttctgttgaattggtgcacaacttctctttggtgcatgatgacctgccttgtatcgatcgtgatgaacaccgacgacatcgacctacggtctgggctctctggggtgacgcaatggctctgctcgccggggacgctatgctgtccctggctcacgaggtcttgcttgactgtgactctcctcacgtcggtgccgcccttagagccatcagtgaggctacccgagagctgattagaggtcaggctgccgacaccgccttcgaaagtcgaactgacgtcgccctggacgagtgtctcaagatggctgagggaaagacggccgccttgatggccgcatcagctgaggtgggtgctttgctggccggtgcaccacgatcggtccgagaggcgctggtagcttacggccgccacattggactggcctttcagttggtggacgacctgttggggatctggggtcgacctgagattaccggcaagcccgtttacagcgacctgcgttccagaaagaaaaccttgcccgtcacatggaccgtcgcccatggaggtctcgctggccgccgactggccgcttggctagtcgacgagaccggctcgcaaactgcctcggatgatgaactggcggccgtcgccgagcttatcgaatgtggaggcggaagacggtgggcctccgctgaggcccgacgacatgtgacccaaggcatcgacatggtggctagaattggaatccctgatagacccgctgctgagttgcaggatctagctcattacatcgtggatcgccaggcc

SEQ ID NO: 896 - DNA, 879 bp, Staphylococcus aureus
atgaccaacttgcccatgaacaagctcattgacgaggtcaacaacgaattatctgttgctatcaacaagtctgtaatggatacacagttagaggagtcgatgctgtactcacttaatgctggcggaaaacgaatccgacccgtgctgctgttgctcacactggactccctgaacactgagtacgagctcggcatgaaatcggctattgcacttgagatgattcatacctactttctcattcacgacgacctacccgctatggataatgatgattaccgtcggggcaagctgactaaccataaggtttacggcgagtggacagctattcttgccggtgacgctctgctgaccaaggctttcgagctcattagctctgacgacagactgaccgatgaggtcaagattaaggtccttcagcggctctccatcgcgtccggacacgtgggcatggtcggcggccagatgctagacatgcagtccgaaggccagccaattgacctggagacactagagatgatccataaaactaaaactggggccttgcttacattcgcagttatgtccgcagccgacattgctaacgtggacgacaccactaaggaacacctcgagagctactcttaccacttgggcatgatgtttcagattaaggacgacttgcttgattgttacggtgatgaggcaaagttgggtaagaaggtgggctcagacctggagaataacaagagtacttatgtctcccttctgggaaaggatggtgccgaggacaagctcacttatcaccgagacgctgctgtcgacgagcttactcagattgacgagcaatttaacaccaagcacctcctggagatcgttgacttattctattctagagaccac

SEQ ID NO: 897 - DNA, 891 bp, Picea abies
atggaatttgatttcgataagtatatgcacagtaaggccatcgcggttaacgaggcgttagataaagtaattccaccaaggtatccgcagaaaatttacgagagcatgagatattccctacttgccggtggtaagcgtgtgagacctatactttgtatagcagcgtgtgagttgatgggaggcacagaagaacttgcaatgcccacggcctgcgcgatagaaatgatacacacaatgtcattgattcacgatgatctgccgtacattgataatgatgatttgcgtagaggaaagcccacaaatcataaagtattcggggaggataccgcaataattgccggagatgcactattgtctctggcctttgagcatgttgccgtatcaacctcaagaactctggggacagacatcattctaagactgcttagcgagatcggaagggcgaccggaagcgaaggggtaatgggtgggcaggtcgttgatatagagtcagaaggagatccctcaatagacttggagacgctggagtgggtgcacatccacaagaccgcagtcctgttggaatgttctgttgtgtgcggagcgataatgggcggcgcatctgaggacgatatcgagcgtgcgcgtcgttatgctaggtgtgtcggactgttattccaagtcgttgacgatattcttgatgtttctcaaagttccgaagaactggggaaaacagccgggaaagatttaatttctgataaagcaacgtatcccaagcttatgggtttggaaaaagctaaagaattcgccgatgaacttctgaataggggaaaacaggagttgagctgcttcgatccaactaaagcggcaccgcttttcgccctagctgactacatcgcatccaggcagaac

SEQ ID NO: 898 - DNA, 888 bp, Abies grandis
atgttcgattttaataagtacatggactcaaaggccatgactgtgaacgaggcattaaacaaagcgataccattgaggtaccctcagaaaatatatgagagtatgcgttattctttattggcgggaggcaaaagagtaagacccgtactatgtatagctgcgtgtgagctagtggggggaacggaggaattagcgatcccgactgcctgtgcgatagagatgatccatactatgagcctaatgcatgacgatttgccgtgtattgataacgatgatttacgtaggggaaaacctaccaatcacaaaatcttcggcgaggacacggcggtcacagcaggtaatgctctacactcttatgcgttcgagcacatcgccgtatctacgagtaagactgtaggagccgacagaatattaaggatggtttctgaacttggaagagctactgggagcgagggtgtcatgggcgggcaaatggtggatatagcgtcagaaggagacccatccatagacctgcagacacttgagtggatacatatacacaaaacggctatgctgttggaatgcagcgtggtttgtggagcaatcatagggggggcttccgagatcgtaattgaaagagccaggagatacgcacgttgcgtcgggcttctttttcaagtcgtagatgatatactagatgttactaagtctagtgacgaactgggcaagacagcgggcaaggatctaatttctgataaagcgacgtacccaaagttaatggggctggaaaaagctaaggagttctccgacgaattactaaaccgtgccaaaggagagctttcctgttttgatcctgttaaagccgctcctctgttaggattggcagattatgtcgcatttagacagaac

SEQ ID NO: 899 - DNA, 1080 bp, Catharanthus roseus
atggctaatgtggggcagcaagtccaaaggcagtctaacagcgtagcggaagagccgttggatccattttcactagtcgcagacgaattatccatcttagcgaacagacttagatcaatggtcgtcgctgaggttcctaaattagcctctgcagcagaatactttttcaagctgggcgtagagggcaagagattccgtccgaccgtcctattattgatggctacggctattgacgctccaattagcagaacaccgccagacacctccctggataccctatccactgagctacgtctaagacagcagactattgcggaaatcacgaagatgatacacgtagcctcccttctacacgatgacgttttagatgatgctgagacccgtagaggtataggttcattgaatttcgtgatgggcaacaaacttgctgtgttagcaggtgactttttattgagcagggcctgcgtcgcactagcttcactaaaaaacaccgaggtcgtaagtttgctggcgaccgttgtggagcatttagttactggcgagaccatgcagatgaccacaacctctgatcaaaggtgctcaatggagtactatatgcagaagacatactatatgacagcgagccttatatctaattcctgcaaggcgatagctctattagcgggtcaaacgtccgaagttgcgatgctggcctacgaatatggcaaaaacttaggtcttgcgttccagcttattgatgacgttctagatttcaccgggaccagcgcgagcttggggaaaggttctttgagcgacattcgtcatgggatagttactgctccgatattatttgccatcgaagagtttccagagttacgtgcggtcgttgacgaaggcttcgaaaatccctacaacgttgacttagccttgcattatctaggcaaatctcgtggcattcaaaggacaagagagttagccatcaaacatgcgaacttggcatcagacgcaatcgactcacttccagttacggacgatgagcacgtccttagatccaggagagcattagtagaacttactcaaagagtcatcaccagacgtaag

SEQ ID NO: 900 - DNA, 891 bp, Picea abies
atggagtttgatttcgacaagtacatgcattctaaagctatcgccgtgaatgaagcattggacaaagttatcccgcctaggtatcctcaaaaaatatatgaaagtatgcgatattctttattagctggcggtaagagggtgcgtccgatcttgtgcatagcagcctgcgagttgatgggaggtacggaagaattagctatgccaacagcatgcgcaattgaaatgattcatacgatgtctttgatccatgatgatttgccttatatagacaatgacgaccttagacgcggtaaaccaacaaatcataaggtttttggagaagatacagccatcattgctggagatgccttattgtcgttagctttcgaacatgtcgccgtttcaacaagcagaacgttaggtactgacataatcttgagattattatccgaaataggaagagctacgggttctgaaggtgttatgggcggacaagttgtagatattgaatcagaaggagatccctcaatcgacttggagactcttgaatgggttcacatacataagacggccgttttactggaatgttctgtagtgtgtggtgccataatggggggtgcatcagaggatgatattgagagggcaaggagatacgctagatgtgtggggcttctatttcaagtggtagatgatattctagatgtctcgcaatcttccgaagaacttggtaaaacagctgggaaagacttgatatcagataaggctacttaccccaagttgatgggtctcgaaaaagctaaagagtttgccgatgaattattgaatagaggaaaacaggagctaagttgttttgatcccactaaagcagcaccgttgttcgcattagctgactatatagcgtcgcgtcaaaac

SEQ ID NO: 901 - DNA, 888 bp, Abies grandis
atgtttgacttcaataaatacatggattctaaggcaatgaccgttaatgaagctctcaacaaggccatcccattgagatatccacagaagatttacgaatctatgagatactcattgttagcaggtgggaaaagagttagacctgttttgtgcatagcggcctgtgaattagtaggtgggacagaagaattagccattccaactgcctgtgccattgaaatgatccacaccatgtctttgatgcatgatgacttgccgtgcatcgacaacgatgatttgcgtagagggaaacccactaaccacaagatatttggtgaagacaccgcagtgacggccgggaatgctttgcattcttatgcgttcgaacatattgcagtttctacatcaaaaaccgttggggccgatcgtatattaagaatggtttccgaattaggccgcgccacaggttcagaaggtgttatgggcggacaaatggtcgatattgcttcagaaggtgacccttccatagatctgcagacgctggagtggattcatattcataagacggccatgctgttagaatgcagtgttgtctgcggtgctataataggaggggcttcggaaatagtcatcgagagagcgcgtagatatgccagatgtgtgggtttactgttccaagtagttgatgatattcttgatgttaccaaatcctctgacgaactcggtaaaactgccggtaaggatcttatttcggataaagcaacatatccaaaattgatgggactggagaaagctaaagaattttcggatgaattgttaaacagagccaaaggtgaactatcttgctttgatcccgtgaaggctgctcctttgttagggttggctgattatgtggccttcagacaaaat

SEQ ID NO: 902 - DNA, 1080 bp, Catharanthus roseus
atggctaacgtgggccagcaagtccaacgtcagagtaattcagttgcggaagagccattagacccattttctctggttgccgatgaattgtccattttggctaataggctgagatccatggtagttgcagaagtccctaaacttgcaagcgcagcagaatatttttttaaattgggggtcgagggtaagcggtttagacctaccgtcttgttgttaatggctaccgctattgacgcacctatctcgaggactccgcctgacacttcacttgacaccctatccacagaattaaggttgagacaacagacaattgctgaaattactaagatgattcatgtagcttcacttttgcatgacgatgtgttggatgacgcagaaacgcgtcgaggtatcggatccttaaactttgttatgggcaataaattagccgtattggctggtgactttttgctatctagggcctgcgtagcactagcaagcttaaaaaacaccgaagttgtgtcgttgttggcaaccgtcgttgaacacttagtcacaggcgagacaatgcagatgacaacaacatcagatcagagatgctcaatggaatactatatgcaaaagacctactatatgacagctagtttgatttcaaattcgtgtaaagcaattgcacttcttgctggtcaaacaagtgaggtagcaatgttggcatatgagtatggcaagaatctaggcttggcgttccagcttattgacgatgttttggattttaccggtacctctgcttctctgggaaaaggttcattgtccgacattcgtcatggtatcgtcacggcccccatcctatttgcgattgaagagtttcctgaactaagagccgttgttgatgaaggattcgaaaatccatacaatgtggacctagcccttcattacttaggtaaatctagaggaattcagaggaccagagaactggccatcaaacatgctaatttagcttctgacgccattgattcccttcctgtaacagatgacgagcatgttttgagatctagacgtgccctagttgaattgacccagagagtaataactagaagaaaa

SEQ ID NO: 903 - DNA, 1053 bp, Abies grandis
atgcagtataaactagcattaaatgggaaaactctaaagggcgaaaccactacggaagcagtagatgctgccacggcggaaaaagttttcaagcaatacgccaacgataatggcgtggacggggaatggacctatgatgatgcgacaaagacttttactgtcacggagttcgattttaataagtacatggactcaaaggcgatgaccgttaacgaagcgttaaacaaggctattcccttacgatatccacagaagatctatgaatcgatgaggtattcattattagctggaggtaaaagagtcaggccagtcttatgtattgctgcttgtgaacttgtaggtggtaccgaggaattagcaattccgactgcatgtgctatagagatgatacatacgatgagcttgatgcatgatgatcttccatgcattgataatgatgatctgcggcgtggcaaacctacaaatcataagatatttggtgaggataccgcagtcacagcaggaaatgctttgcacagttacgccttcgaacatatagccgtatcaacgagtaaaactgttggggctgatagaatactgagaatggtttcagaattaggccgcgccaccgggtctgaaggagttatgggaggacaaatggtagatattgcgtccgaaggggatccaagtatcgatttgcagacattggaatggatccatatacacaagacagccatgttgttagagtgctccgtcgtttgtggtgccataattggtggtgcttcagaaatcgtcattgaaagagcaaggcgttatgccagatgtgttggactattgtttcaggtagtggacgatattttagatgtcactaaaagtagtgatgaattgggcaagacagctggtaaggacctgatcagcgataaagcaacctacccaaaactcatgggcctggaaaaggccaaggaattttcggatgagctgctaaatagagctaagggcgaactatcctgcttcgacccagttaaagctgcacctttgttgggtttagctgactacgttgctttcagacagaac

SEQ ID NO: 904 - DNA, 1245 bp, Catharanthus roseus
atgcagtataaactagcattaaatgggaaaactctaaagggcgaaaccactacggaagcagtagatgctgccacggcggaaaaagttttcaagcaatacgccaacgataatggcgtggacggggaatggacctatgatgatgcgacaaagacttttactgtcacggaggcaaacgtaggacaacaagtgcaaagacaatctaactcagtcgctgaggaaccgttagatccattctctctggttgcagatgagctatcgattttggctaatcgactaagatctatggttgtcgctgaagtgccaaaactagcgtctgcagcagagtacttcttcaagcttggtgtagaagggaaacgttttcgtcctactgtattgttgctaatggcaacagcaattgatgcccccatttcaaggactcctccagacacttccttagacacattaagtacagaattacgtttgagacaacagaccatcgctgaaattacaaaaatgattcatgtcgcttcacttctacatgatgatgtattggacgacgctgagactcggaggggcataggctccttgaatttcgtcatgggtaacaagttggctgttttggcaggcgattttttattgtctagagcttgtgtggctttagctagcctaaaaaatactgaagtagtaagcttattagcaacagtcgtggagcatctagtcactggtgagacaatgcaaatgaccaccacttcagatcaaagatgctcgatggaatattatatgcaaaaaacatattatatgactgcttcattgatttcgaattcttgcaaggctattgcgttactggccggtcaaacttctgaggtcgctatgcttgcatacgaatacggcaaaaacctcggcttggcttttcaattaattgatgatgtcttagattttacaggtacatctgcttcgcttggtaagggttctttgtcggatattaggcacgggattgttactgcaccgattctatttgcaattgaagaattccccgaactcagagccgtcgttgacgaaggcttcgagaatccttataacgtggatttggctttacactatttgggaaaatctcgcgggatccaaagaacaagagagttggctattaaacatgccaatttggcatctgatgcaattgattctttgccagttacagatgacgaacatgtgttgagatctagaagagcattggtggagttgactcaacgtgttataacaagacggaaa

SEQ ID NO: 905 - DNA, 1056 bp, Picea abies
atgcagtataaactagcattaaatgggaaaactctaaagggcgaaaccactacggaagcagtagatgctgccacggcggaaaaagttttcaagcaatacgccaacgataatggcgtggacggggaatggacctatgatgatgcgacaaagacttttactgtcacggaggaatttgatttcgataagtatatgcattctaaggcaattgccgtgaatgaagcattagataaagtaataccaccccgttatccacaaaaaatctacgaatccatgagatatagccttttggctggcggtaaaagggttagacctatactttgtatagccgcctgtgagttgatgggtggtactgaggagttagctatgccaaccgcttgtgcaattgagatgatccacacgatgagcctcatacatgatgatctaccttatattgacaatgatgacttaagacgtggcaagccaacgaaccacaaggttttcggagaggatacagctattattgcgggcgacgctttgctatctctagcatttgaacatgtagcagtatctacttcccgcactttagggactgacatcattttacgcttattgtcagagataggtcgtgccactggttctgagggagtcatgggtggtcaggtcgtcgatatcgaatccgaaggagatccttcgattgatctagaaacactagaatgggtgcacattcataaaactgcagtattgttagagtgtagtgttgtttgtggagcaattatgggaggtgcttctgaggacgacatcgaacgagcaagacgctacgcaagatgcgtaggtttactattccaagtagttgacgatatattggatgtttcccaatcttccgaagaattagggaagactgcaggtaaagacttaatatcggacaaggcgacataccccaaactcatgggtttggaaaaggccaaggaattcgctgacgagttgctaaatagaggcaagcaagaactgagctgcttcgacccaactaaagctgcccctttattcgccctagcagattacattgcatctaggcaaaat

SEQ ID NO: 906 - DNA, 891 bp, Humulus lupulus
atgtcgacattcaacttcaaatcatatatggtccaaaaagccaactcggttaaccaagccttggatgcagcggttttgctaagggagccacagatgatccacgaagccatgagatacagccttttggctggaggaaagagagtgagaccagtcttatgtttaagcgcatgcgaactagtcggcggagatgaatcagtcgccatgcctgccgcttgcgcagttgaaatgattcacaccatgagtctgatacatgatgacttaccgtgtatggataatgatgacttacgtcgaggcaaacccacgaatcataaggtcttcggtgaagatgtagccgtccttgccggagacgctctactagcatacgctttcgaacatgtggctgtttcaaccgtcggtgtaccagctgctagaattatacgtgctattggcgagctagctaagtctattggcagcgagggactagttgcaggacaagttgttgacatcgactcagaaggattggcaaatgttggattggaacaattagaatttatacatcttcataagaccgctgccttgttagaagcatctgtcgtactaggtgctattctgggcgggggtacggatgaacaagtggaagaattgagatcgttcgcgcggtgtattggactattgttccaggcagttgatgatatcttggacgttacgaagtcaagccaagagttgggtaaaaccgccggtaaagatttagtcgcagataaagcaacatatcccagattgatggggatagaaaagtccagggaattcgcagaaaagttgaaccgcgaggctcaagaacatttaggcggttttgacccgcaaaaggctgcaccactgatcgccctggccaactacatagcatacagacaaaat

SEQ ID NO: 907 - DNA, 783 bp, Humulus lupulus
atggcaagcattacggccgacatcgaagcccacctgaagcaatccattacgctaaaaccaccgttatcggtgcacgaaccaatgtataacctagtattctcggcaccacctaattctgctccgtctttgtgcgttgccgcttgtgaattggttggtggccacagatccaaagcaattgctgcagctagcgccctcagattactgcatgctgctaattttacacatgagcatttacctctcacagattctccttctccatcacctgttatacataatagctatgatccatctatccaattgctgatgccagatgcaatattaccgctaggtttcgaattgctagcacaatcttataacccagctcaaaacaatagtgatagagtgttaagagttatagtcgagtttgctagagcctttggctcaaaggggattttggatggccaatacagacaaagggtagtttctatttccaacggtgatgaagtcgataacgccgaaagggttgattgctcaggaagagaaaaggagggtaaaatgcacgcatgcgcggctgcatgtggagctatactgggtgatgccaacgaggaggaaacagaaaagctcagaacttttggtttatatgttggtatgattcaaggttattcaataaaatttatgagggaaagagaagaagaaaaagaagcagagagaactatcaaagaactaagaaatctagcactgaaagagttagaacactttcatggtagaaaattagagcccatttcctcatttatttattgtctc

SEQ ID NO: 908 - DNA, 891 bp, Mentha x piperita
atgcccgcatttgactttgatggttatatgttgagaaaagctaaatctgttaacaaagcactagaagcagctgttcaaatgaaggagccattaaaaatacacgagagtatgcgatactccctcttggctggtggcaaaagagtaagaccaatgttatgcattgctgcttgtgaactagtcggcggagacgaatcgacagctatgccggctgcgtgcgccgttgagatgatccatacaatgtctttaatgcatgatgatttaccgtgtatggataatgacgatcttagaaggggaaaaccaacgaatcatatggcttttggcgaatcggtcgccgtgcttgccggggatgcattactgtcatttgccttcgagcatgttgccgccgctaccaaaggtgccccaccagaacgtattgttagggtacttggcgaattagccgtctctatcggttcagagggattagtagccggtcaagtggttgatgtttgttctgaggggatggctgaagttgggctagaccatttagagtttatccaccaccacaaaaccgcagccttattacaaggttctgtggtgttaggtgctattttggggggtggcaaggaagaagaggtagccaagctacgtaaatttgctaactgcataggtttactgttccaagtggtggatgatattcttgatgtaacaaagtcttcaaaggaattgggcaaaacggccggtaaagacttagttgcagataaaactacgtatccaaagttgattggtgtcgagaagtctaaagaatttgctgataggttgaacagggaagctcaagaacaattactccactttcatcctcatagagccgctccgctcattgccttggctaactacattgcttacagagacaat

SEQ ID NO: 909 - DNA, 801 bp, Mentha x piperita
atgtctcaaccttactgggctgcgattgaagcggacatagaaagatatctaaaaaaatcaataactattagacctccagaaacagtctttggcccaatgcaccacctaactttcgcagcccccgcaactgctgcttcaaccctatgcctggctgcctgtgaactagttggtggagacagaagtcaagcgatggccgcagcagccgccattcacctagttcatgctgctgcatacgtgcatgaacatctcccacttaccgatggctcccgtcctgtttcgaaaccggctatacaacacaaatacggccctaatgtagaattgttgactggtgacggcattgtcccctttgggtttgaattacttgcaggttccgtggatccagcaaggactgatgacccagataggatccttcgagtgataattgagattagtcgcgcagggggtcccgaaggtatgatttcgggtttgcacagggaagaagaaattgtcgatggtaatacatctcttgatttcattgaatatgtgtgtaaaaagaagtatggtgaaatgcacgcatgcggtgccgcatgtggtgctatccttggtggtgctgcagaagaggaaatacagaagttaagaaattttggcctgtaccaggggactctaagaggtatgatggagatgaaaaacagccatcaactgattgacgaaaacattattggcaaattgaaagaattggcgcttgaagagcttggtggctttcatggcaaaaatgctgagttaatgagttccctggtggctgaaccaagtttatatgctgcc

SEQ ID NO: 910 - DNA, 891 bp, Catharanthus roseus
atgagttcttttgatttcaaagcatacatgataggtaaggcaaatagcgttaataaagcattagaagatgcggttttagtcagagaacctctgaaaattcatgaatcgatgaggtattcattgttggcaggtggtaaaagagttagaccaatgctttgtattgccgcttgtgaactgttcggtgggacggaaagcgtcgctatgccatcagcctgtgcagttgaaatgatccacacgatgtcactgatgcatgatgatctgccatgtatggataacgacgatttaaggaggggtaagccaacaaatcataaagtttttggtgaggacgttgcggttttagcaggtgatgcgctgttggctttcgcatttgagcatattgcaactgccactaagggtgtttcctcagaaagaatagtccgtgttgtcggcgaattagccaagtgtatcggttccgaagggttggttgctggacaggttgttgatgtgtgttcggaaggaattgccgacgtaggactagaacatttagaattcatacatattcataagacagctgctttattagagggttccgttgtcttgggcgctatcgttggtggtgctaatgacgagcaaattagtaagctgagaaaatttgcgagatgtataggtttgttatttcaagtcgttgacgacatcctggatgttactaagtcttcacaagagctgggaaagacagcaggcaaggatttggtcgctgataaagtcacctatccgaagctcctaggaattgacaaatcacgtgagtttgccgaaaaattgaatcgcgaagctcaagagcaattagctgaatttgacccagagaaagcagcgcctttgatagccttagctaactatattgcctacagagacaat

SEQ ID NO: 911 - DNA, 783 bp, Catharanthus roseus
atgaagtctaacagttgggcaaacatagaatctgatattcaaactcatctaaagaagagcattccaatccgtgcacctgaggacgttttcgagcccatgcattatttgacattcgctgcacctcggacgactgcccctgcattgtgtatcgctgcttgtgaggttgtgggaggtgacggtgaccaagccatggcagccgcagccgccatacatcttgttcatgcggcagcttacgctcatgaaaatttgccattaacagataggaggcgaccaaagccgcccatacaacacaagtttaattcgaatattgagctactgacaggtgatggcattgtgccgtacggtttcgaactcctagctaagtcgatggacagcaacaatagtgacagaattttgcgcgttattatagaaataacgcaggccgctggctccaaagggattatcgacggtcagttcagagagttggacgtaatagattccgaaatcaacatggggctaatcgaatacgtctgcaaaaagaaagaaggagaattgaatgcttgtggtgcagcttgcggtgcgatcttaggtgggggctctgaagaagagattggtaaattaagaaagtttggtttatatgctggcatgattcaaggccttgttcacggcgttggcaaaaatcgtgaagaaattcaagaattagttagaaaattacgttacttagccatggaagaactcaaaagcttgaaaaatagaaagattgacactatttcctccttgttggaaactgatttgtgttcagta

SEQ ID NO: 912 - DNA, 891 bp, Nepeta cataria
atggcgccttttaattttaacgcttatgtcgttgagaaagctaacagagtcaacaaagccttagacgatgccgtggaagtaaagaacccaccaatgatccacgaagcaatgagatactcgctattagccggtggtaaacgtgtacgtccaatgttatgtatagcagcttgcgaaatagtgggtggccatcagtcagcagccatacctgccgcctgtgcagttgaaatgatccatacaatgtctctaatacatgatgatcttccatgcatggataacgatgacttgagaagaggtaagccaacaaatcacaaagtttttggtgaggaggtagctgttttggctggtgatgccctgcttgcttttgcttttgaattcatcgctactgccacagttggtgtggcagctgaacgcattctggctgctgttggtgaattggccaaggcgattggtactgagggtttagtcgctggacaagtcgttgatttgaattgtaccggaaatgccaatgtcggcttggagacactggaattcatccatattcacaaaactgctgcacttttggaagcttctgtggtattgggtgctatattgggcggtggctctgacagcgaagtcgagaaattgagaacattcgccagaaaaataggtctattgttccaagttgtagacgacattctagacgtcaccaaatcttcggaagagctcggcaagactgctggtaaggatctaaccgttgacaaaactacgtatcctaaattactgggtttagagaaggcagttgaattcgcagaaaagcttaacgaagaggcgaaggcacaactagctgaatttgaaccctgtaaggccgcaccgttggcagctttagcagactatatagcccataggcaaaac

SEQ ID NO: 913 - DNA, 819 bp, Nepeta cataria
atgaaccagtcatattgggcagctatagaggcggatatagggacataccttaagaaatcgatacctatccgtcctcccgaaaccgtctttgagccaatgcaccatttgactttcgccgcaccaaccaccgccgcctctgccttatgcgtggcagcatgcgaactgactggaggcgaccgctcacaagcattggttgcagcatctgccattcacttagtacatgcagctgcctatgctcatgaacacttaccattaactgataggccaagacctgaatctaagccagaaatccatcataaatactcccctaatatcgagttgttaactccagatggtatggtacctttcgggtttgagcttctagcgaggagcatggatcctgccagggatggcgatccagacaggattctacgagtcattatagagatttcaagagctggtggctccgaaggtatgattgacgggctatatcgtgaagaagaaatagcagatctaaactacccaaggcctgatttcattgagtatgtgtgtaaaaaaaaatacggcgaacttcatgcttgtggggccgcatgtggggcaattttggccggagctgctgaggaagaagtcgagaaactaagaaattttggtagatacgccggtacattaattggtattatggggaataagtataatgttccggaaattgggaatatcatctcaaaactgagagagtttgcaatggaagagcttgaaaaaggatttcatggaaaaaatattgaactgatctcgagcctagtggcggagccatcacaagtggccgagagcctatcagcggcg

SEQ ID NO: 914 - DNA, 1071 bp, Streptomyces aculeolatus
atgaccactgaagtaacttctttcacaggcgccggaccacacccagcagcctctgtacgcagaataacagatgacttgttacaaagggtcgaggataagttagcgtcatttttaaccgctgaaagggaccgttacgccgcgatggatgagcgagctttggcagccgttgatgcactgactgatctagtaacgagtggcggtaaaagagtgcgccctacattctgtattactggttatctagctgcagggggcgatgccggggaccctgggattgttgcagcagctgccggtcttgaaatgttgcacgtttctgcacttatccatgacgatatattagacaactcggctcaaagacgaggcaaacccacgattcatactctatatggcgatttgcatgattcgcatggttggaggggtgaatctaggcgattcggagagggtattggcattctgattggaaacttggcgctagtttattcacaggaacttgtttgccaggctcctccggctgttctggctgaatggcatagattatgtagtgaagttaacattggtcaatgtctggatgtgtgtgctgcggctgaattcagcgccgacccagaattaagtaggttggtagcactgataaaaagtggtagatacacaatccataggccattggtgatgggagcaaatgctgccagcagacctgacttggctgcagcttacgttgaatacggtgaagccgtcggcgaagcttttcaactgagagacgacctattggatgcattcggggactcaactgaaacgggtaaacctactggcttagacttcactcaacataagatgactttattgttaggatgggctatgcaaagagatactcatattagaacactgatgactgaaccaggtcacacaccggaagaagttaggcgtagattagaagacactgaggtacctaaagatgtggaaagacatattgctgatttggtggaacaaggaagagccgccattgctgacgcccctatcgaccctcagtggagacaggaacttgctgacatggctgttagagcagcatacaggacaaat

SEQ ID NO: 915 - DNA, 1056 bp, Streptomyces sp. KO-3988
atgactactgacactggccaagacgccgtcggtttggccagacggacgggggctgatctgttgcatagagtagaggaccgcctacgttcattgttggcagtagaaagagatgcctgggcagcggtgcacgaacaagctgtcgtcccagttgatgctttgagtgagttaatcgcgagcggaggcaaacgtattcgccctgctttttgcataactggatacttagctgctggtggagaccctgcagaacctggtatagttgccgcaggtgccgcccttgagatgttacatctatctgcacttgtgcacgatgatgttctagacgattcatcatcaagaaggggagtaccaacagttcatacgcaagcaatggccttgcatgagtcttcgggttggcaaggtgaacctagacgttatggagagggagtcgctatcttggtgggtgatttagcattagtatactcagaagagttaatggctgaggccccaagaagagttctacctgaatggaacaagctaagatctgaagtaatgataggacaatatatggacgttcatgctgctgccgaattttccgtcgatccacgatcttcacggttgatcgctcgaattaaatccggacgctataccatacacaggccattggttgttggcgctaagagaggccgaggtagaggtgatctagcaccagctttagaagaatacggcgaggctgtaggtgaagcattccaattgagagacgacttattagatgcatcggcaactcccgcggaaactggcaaacctacgggcttggattttactcagcacaaaatgacattgttattaggatgggcgatgcaaagagacgagcatatacatactttggttacggaacccggacatacgcccgacgaagttagaagaagattactggacactggagtacctgccgacgtggaaagacatattgcaggcttggtggaaagaggttgtaaagctatcgcagatgcacccgtggatcaagtgtggaggggagaattagctgctatggccggacgagtcgcctaccgtaccgct

SEQ ID NO: 916 - DNA, 1056 bp, Streptomyces cinnamonensis
atggcatgtattggaacggatcaagaattaaccgcgttagcaagaagaacgagagaagaattactggaacagatggaggacaggcttagggcttttcttagagctgaacatgaactttgggcagaggttaacgaaagagcagtcggtgctgtggctgctttgactgatttggtggcagcgggaggtaaaagaatcagaccagctttttgtattgcgggttatctagctgcgggtggcgatccagatgatacagcggtcgtagctgccgccgctgctttggaaatgttacatgcctctgctctaattcatgatgatgtgattgatgccagcagtcatagacgcggaagaccaaccgtacatgcgaggcattcagctctccatgatcgtaacgcatggcaaggagaatcgaggagatatggtgaaggtgttgctattctggtcggagatttagcattagtttattcggaacagttgatggcggctgctccgcctgctgttctcccggtatggggtactttaagatctgaattgatgattggacagtacatggacatgacagctgcagctgagttcttagttgatcctagacttagtcggtggatagcccttgcaaagagtggtcattacactattcatcgtcctttggttgtaggcgcaagtgccgccggaagagcggacctggcaccagctttcgccaagtacggtgaagccgtcggggaagcatttcaactccgtgacgacctgttggacgcattcggtgattttgctcatactggaaaaccagcaggattagattttagtcagcataagatgactctattactaagctgggcaatgcaaagagatgctagaattcattcattgataactgagcctggtcatacccccgatgaagttcgtaggagattagtagacacgggcgtgccagatgatgtggagaaacatatagctggtttggtggaacaaggttgtgaagccatagctgacgtgcctatcgatcctgtttggcggacagaactgactactatggctacccaagctgcatatagaaccacg

SEQ ID NO: 917 - DNA, 1053 bp, Streptomyces longwoodensis
atgacacgtagagctgctacagaccaagctactagtgcgagacgtacggttgaagacttacttcagcgagttcaacataggttaacaagtttcttggccgcagaaagggcgcactacgccgaagtgcatgagcatgccgtggtggcaatagatgccctagccgatctagccgctgcgggtggtaagttgctcagaccagcattttgcttgacgggatatttggcagcaggaggagacccagccgagcctggtattgtcgatgcagcagctgcactggagttgcttcatatttccgcactagtacatgatgatgtgttggacgattctagaactagaagaggtaagccagcagttcatgtcttacataccactctacatcggactagagggtggcaaggtgaatctcgaaggtttggagagggagttgccttattggtcggtgatttggcactagtatattccgacgagttgatggctggggcgccgcgtggtgcctttgccgaatggcatcggttaagaagtgaagtgatgattggtcaatatatggatgttgctgctgctgcagaattttcagttgatccagatttgtctaggctgatcgccttaatcaagagcggtaggtataccattcacagaccgttagtcttaggtgccagtgctgccggtcggaccgatcttgctggtgcactggcacattatggtgaggctgtcggagaagcattccagttaagagatgacctattagatgcatttggagacgcagctcgtaccggtaaaactgctggtttagatttttctcaacacaagatgacactactcttaggctgggcaatgcaaagggattcaagaattcatgatttaatcaccgaaccaggacatacacctgatgagatacgtgcaagactacttgatacaggtgtgccagcagacgtcgagcaacatatagcacatctagtcgaccaaggttgtgcggctcttgctgacgctcctctagagccacaatggagagcacagttaactgacatggcgttgagggtagcttatagagacaag

SEQ ID NO: 918 - DNA, 1056 bp, Streptomyces sp. GKU 895
atgcctcaaaatgtacgaggtgaggaatcagctgctgctgctagaaggactgtagaagagttattgcaacgtgtacaagatagactctcaggcttccttgctgcagaacgggcgcgatacgccgaagttgatgagagggccgtggtagcaatagacgctctgagtgacttagtcgaagcagggggtaaattggttcggccggctttttgtttagcaggatatttggccgccggaggcgatccagaagcacctggtatcatagatgctgctgctgctttggaaatgttgcacatcagtgctctagtgcacgatgatgttttagacgattcgaggacacgcaggggaaaaccagcagtgcatgttttacactccagtttacacagaagtagagggtggcaaggggaagcgcgtcgattcggtgagggagtggctcttctcgtcggtgatttggcattggtatatagtgatgaacttatgtcacatgctccggcaactgctggccctgaatggcatcgcttgcggtctgaagtgatgattggtcaatacatggacgttgcagccgcggctgaattttcagtggatcctgcgttgagtcgtcttattgccctaatcaagtctggcagatacacaattcatagacctttagtggtaggcgcatctgctgctggcagggccgacctagcaccagcgttggcagaatatggtgaagctgttggagaagcattccaattgcgtgatgatctactagatgcgtttggcgatgcggctcaaacggggaagacagccggcttagacttctcccaacacaaaatgacattattgttgggttgggcaatgcagcgagacgcacacattcacggacttatcacagaaccaggtcacacaccggacgaagttagagctagattgttggacacaggagtaccagaggaagtggaacgccatattgcggccctagtcgatcaaggttgtgcggcaattgcagacgctcccgttggcccgcagtggagatcagaattgactaacatggctctaagggttgcatataggaataaa

SEQ ID NO: 919 - DNA, 1071 bp, Streptomyces sp. NRRL S-37
atgccagtcacctctgatgcaactcgtgacacaggtcaggaagcagtatctcacgccagaagaattacaacagatcttctaagaagggttgaggatcgtttgtcatctttgttggccgcagagcgtgaggtatgggcagaagttcatgagggagctgtggtcccagtggatgcacttgctgagttgatggcaagcggaggtaaacgcatccgccctgcattttgcgtaacaggttacttagctgcaggtggtgatcctgatgccccaggaatagtcgctgctggtgctgcgttggagatgttacacattagtgctttagtccacgatgatgtgctggatgattcttcgagacggcgaggtttacctacagttcatactaagcatgcagccttacacgattcaagaggttggcagggtgaatcacgccggtacggtgaaggtgtggcagtactggtaggagacttagcactagtatactcagacgcgttaatgaccgaagcacctagacaggtcttacctgagtggaatcgattgagaagcgaagttatgataggtcaatacctggatgtccatgctgccgccgaattctctgcttctccgcgctcggctcggttgatagcaagaattaaatcaggcagatataccatacaccgtccattagtagttggtgctaaggcagctgggcgtgatgagttagcgccagtctttgaggaatatggtgaagcagtaggtgaggctttccaattaagagacgaccttctggacgctttcggtgatagtaccgacacgggtaagccaacaggactagacttcacccaacacaagatgacactcttactgggttgggcaatgcagagagatgaaagagtccatggtttgattaccgaaccaggtcatacccctggggaggtaagaagacgattggtcgatactggagttcctgcagacgtagaaagacatatcgcaggcttagtggaaagaggctgtaaggctatcgcagatgctcctatagatcaagtttggaggggtgaactggcagatatggctagacgtgcagcttacaggtctgca

SEQ ID NO: 920 - DNA, 1236 bp, Streptomyces aculeolatus
atgcagtataaactagcattaaatgggaaaactctaaagggcgaaaccactacggaagcagtagatgctgccacggcggaaaaagttttcaagcaatacgccaacgataatggcgtggacggggaatggacctatgatgatgcgacaaagacttttactgtcacggagaccactgaagtaacttctttcacaggcgccggaccacacccagcagcctctgtacgcagaataacagatgacttgttacaaagggtcgaggataagttagcgtcatttttaaccgctgaaagggaccgttacgccgcgatggatgagcgagctttggcagccgttgatgcactgactgatctagtaacgagtggcggtaaaagagtgcgccctacattctgtattactggttatctagctgcagggggcgatgccggggaccctgggattgttgcagcagctgccggtcttgaaatgttgcacgtttctgcacttatccatgacgatatattagacaactcggctcaaagacgaggcaaacccacgattcatactctatatggcgatttgcatgattcgcatggttggaggggtgaatctaggcgattcggagagggtattggcattctgattggaaacttggcgctagtttattcacaggaacttgtttgccaggctcctccggctgttctggctgaatggcatagattatgtagtgaagttaacattggtcaatgtctggatgtgtgtgctgcggctgaattcagcgccgacccagaattaagtaggttggtagcactgataaaaagtggtagatacacaatccataggccattggtgatgggagcaaatgctgccagcagacctgacttggctgcagcttacgttgaatacggtgaagccgtcggcgaagcttttcaactgagagacgacctattggatgcattcggggactcaactgaaacgggtaaacctactggcttagacttcactcaacataagatgactttattgttaggatgggctatgcaaagagatactcatattagaacactgatgactgaaccaggtcacacaccggaagaagttaggcgtagattagaagacactgaggtacctaaagatgtggaaagacatattgctgatttggtggaacaaggaagagccgccattgctgacgcccctatcgaccctcagtggagacaggaacttgctgacatggctgttagagcagcatacaggacaaat

SEQ ID NO: 921 - DNA, 1221 bp, Streptomyces sp. KO-3988
atgcagtataaactagcattaaatgggaaaactctaaagggcgaaaccactacggaagcagtagatgctgccacggcggaaaaagttttcaagcaatacgccaacgataatggcgtggacggggaatggacctatgatgatgcgacaaagacttttactgtcacggagactactgacactggccaagacgccgtcggtttggccagacggacgggggctgatctgttgcatagagtagaggaccgcctacgttcattgttggcagtagaaagagatgcctgggcagcggtgcacgaacaagctgtcgtcccagttgatgctttgagtgagttaatcgcgagcggaggcaaacgtattcgccctgctttttgcataactggatacttagctgctggtggagaccctgcagaacctggtatagttgccgcaggtgccgcccttgagatgttacatctatctgcacttgtgcacgatgatgttctagacgattcatcatcaagaaggggagtaccaacagttcatacgcaagcaatggccttgcatgagtcttcgggttggcaaggtgaacctagacgttatggagagggagtcgctatcttggtgggtgatttagcattagtatactcagaagagttaatggctgaggccccaagaagagttctacctgaatggaacaagctaagatctgaagtaatgataggacaatatatggacgttcatgctgctgccgaattttccgtcgatccacgatcttcacggttgatcgctcgaattaaatccggacgctataccatacacaggccattggttgttggcgctaagagaggccgaggtagaggtgatctagcaccagctttagaagaatacggcgaggctgtaggtgaagcattccaattgagagacgacttattagatgcatcggcaactcccgcggaaactggcaaacctacgggcttggattttactcagcacaaaatgacattgttattaggatgggcgatgcaaagagacgagcatatacatactttggttacggaacccggacatacgcccgacgaagttagaagaagattactggacactggagtacctgccgacgtggaaagacatattgcaggcttggtggaaagaggttgtaaagctatcgcagatgcacccgtggatcaagtgtggaggggagaattagctgctatggccggacgagtcgcctaccgtaccgct

SEQ ID NO: 922 - DNA, 1221 bp, Streptomyces cinnamonensis
atgcagtataaactagcattaaatgggaaaactctaaagggcgaaaccactacggaagcagtagatgctgccacggcggaaaaagttttcaagcaatacgccaacgataatggcgtggacggggaatggacctatgatgatgcgacaaagacttttactgtcacggaggcatgtattggaacggatcaagaattaaccgcgttagcaagaagaacgagagaagaattactggaacagatggaggacaggcttagggcttttcttagagctgaacatgaactttgggcagaggttaacgaaagagcagtcggtgctgtggctgctttgactgatttggtggcagcgggaggtaaaagaatcagaccagctttttgtattgcgggttatctagctgcgggtggcgatccagatgatacagcggtcgtagctgccgccgctgctttggaaatgttacatgcctctgctctaattcatgatgatgtgattgatgccagcagtcatagacgcggaagaccaaccgtacatgcgaggcattcagctctccatgatcgtaacgcatggcaaggagaatcgaggagatatggtgaaggtgttgctattctggtcggagatttagcattagtttattcggaacagttgatggcggctgctccgcctgctgttctcccggtatggggtactttaagatctgaattgatgattggacagtacatggacatgacagctgcagctgagttcttagttgatcctagacttagtcggtggatagcccttgcaaagagtggtcattacactattcatcgtcctttggttgtaggcgcaagtgccgccggaagagcggacctggcaccagctttcgccaagtacggtgaagccgtcggggaagcatttcaactccgtgacgacctgttggacgcattcggtgattttgctcatactggaaaaccagcaggattagattttagtcagcataagatgactctattactaagctgggcaatgcaaagagatgctagaattcattcattgataactgagcctggtcatacccccgatgaagttcgtaggagattagtagacacgggcgtgccagatgatgtggagaaacatatagctggtttggtggaacaaggttgtgaagccatagctgacgtgcctatcgatcctgtttggcggacagaactgactactatggctacccaagctgcatatagaaccacg

SEQ ID NO: 923 - DNA, 1218 bp, Streptomyces longwoodensis
atgcagtataaactagcattaaatgggaaaactctaaagggcgaaaccactacggaagcagtagatgctgccacggcggaaaaagttttcaagcaatacgccaacgataatggcgtggacggggaatggacctatgatgatgcgacaaagacttttactgtcacggagacacgtagagctgctacagaccaagctactagtgcgagacgtacggttgaagacttacttcagcgagttcaacataggttaacaagtttcttggccgcagaaagggcgcactacgccgaagtgcatgagcatgccgtggtggcaatagatgccctagccgatctagccgctgcgggtggtaagttgctcagaccagcattttgcttgacgggatatttggcagcaggaggagacccagccgagcctggtattgtcgatgcagcagctgcactggagttgcttcatatttccgcactagtacatgatgatgtgttggacgattctagaactagaagaggtaagccagcagttcatgtcttacataccactctacatcggactagagggtggcaaggtgaatctcgaaggtttggagagggagttgccttattggtcggtgatttggcactagtatattccgacgagttgatggctggggcgccgcgtggtgcctttgccgaatggcatcggttaagaagtgaagtgatgattggtcaatatatggatgttgctgctgctgcagaattttcagttgatccagatttgtctaggctgatcgccttaatcaagagcggtaggtataccattcacagaccgttagtcttaggtgccagtgctgccggtcggaccgatcttgctggtgcactggcacattatggtgaggctgtcggagaagcattccagttaagagatgacctattagatgcatttggagacgcagctcgtaccggtaaaactgctggtttagatttttctcaacacaagatgacactactcttaggctgggcaatgcaaagggattcaagaattcatgatttaatcaccgaaccaggacatacacctgatgagatacgtgcaagactacttgatacaggtgtgccagcagacgtcgagcaacatatagcacatctagtcgaccaaggttgtgcggctcttgctgacgctcctctagagccacaatggagagcacagttaactgacatggcgttgagggtagcttatagagacaag

SEQ ID NO: 924 - DNA, 1221 bp, Streptomyces sp. GKU 895
atgcagtataaactagcattaaatgggaaaactctaaagggcgaaaccactacggaagcagtagatgctgccacggcggaaaaagttttcaagcaatacgccaacgataatggcgtggacggggaatggacctatgatgatgcgacaaagacttttactgtcacggagcctcaaaatgtacgaggtgaggaatcagctgctgctgctagaaggactgtagaagagttattgcaacgtgtacaagatagactctcaggcttccttgctgcagaacgggcgcgatacgccgaagttgatgagagggccgtggtagcaatagacgctctgagtgacttagtcgaagcagggggtaaattggttcggccggctttttgtttagcaggatatttggccgccggaggcgatccagaagcacctggtatcatagatgctgctgctgctttggaaatgttgcacatcagtgctctagtgcacgatgatgttttagacgattcgaggacacgcaggggaaaaccagcagtgcatgttttacactccagtttacacagaagtagagggtggcaaggggaagcgcgtcgattcggtgagggagtggctcttctcgtcggtgatttggcattggtatatagtgatgaacttatgtcacatgctccggcaactgctggccctgaatggcatcgcttgcggtctgaagtgatgattggtcaatacatggacgttgcagccgcggctgaattttcagtggatcctgcgttgagtcgtcttattgccctaatcaagtctggcagatacacaattcatagacctttagtggtaggcgcatctgctgctggcagggccgacctagcaccagcgttggcagaatatggtgaagctgttggagaagcattccaattgcgtgatgatctactagatgcgtttggcgatgcggctcaaacggggaagacagccggcttagacttctcccaacacaaaatgacattattgttgggttgggcaatgcagcgagacgcacacattcacggacttatcacagaaccaggtcacacaccggacgaagttagagctagattgttggacacaggagtaccagaggaagtggaacgccatattgcggccctagtcgatcaaggttgtgcggcaattgcagacgctcccgttggcccgcagtggagatcagaattgactaacatggctctaagggttgcatataggaataaa

SEQ ID NO: 925 - DNA, 1236 bp, Streptomyces sp. NRRL S-37
atgcagtataaactagcattaaatgggaaaactctaaagggcgaaaccactacggaagcagtagatgctgccacggcggaaaaagttttcaagcaatacgccaacgataatggcgtggacggggaatggacctatgatgatgcgacaaagacttttactgtcacggagccagtcacctctgatgcaactcgtgacacaggtcaggaagcagtatctcacgccagaagaattacaacagatcttctaagaagggttgaggatcgtttgtcatctttgttggccgcagagcgtgaggtatgggcagaagttcatgagggagctgtggtcccagtggatgcacttgctgagttgatggcaagcggaggtaaacgcatccgccctgcattttgcgtaacaggttacttagctgcaggtggtgatcctgatgccccaggaatagtcgctgctggtgctgcgttggagatgttacacattagtgctttagtccacgatgatgtgctggatgattcttcgagacggcgaggtttacctacagttcatactaagcatgcagccttacacgattcaagaggttggcagggtgaatcacgccggtacggtgaaggtgtggcagtactggtaggagacttagcactagtatactcagacgcgttaatgaccgaagcacctagacaggtcttacctgagtggaatcgattgagaagcgaagttatgataggtcaatacctggatgtccatgctgccgccgaattctctgcttctccgcgctcggctcggttgatagcaagaattaaatcaggcagatataccatacaccgtccattagtagttggtgctaaggcagctgggcgtgatgagttagcgccagtctttgaggaatatggtgaagcagtaggtgaggctttccaattaagagacgaccttctggacgctttcggtgatagtaccgacacgggtaagccaacaggactagacttcacccaacacaagatgacactcttactgggttgggcaatgcagagagatgaaagagtccatggtttgattaccgaaccaggtcatacccctggggaggtaagaagacgattggtcgatactggagttcctgcagacgtagaaagacatatcgcaggcttagtggaaagaggctgtaaggctatcgcagatgctcctatagatcaagtttggaggggtgaactggcagatatggctagacgtgcagcttacaggtctgca

SEQ ID NO: 926 - DNA, 1047 bp, Penicillium aethiopicum
atggcaaccagcacgacaacttctttaaaggaatttttgtcagttttcccacagcttgtggccgatttgcgtgcattatgtttggaggaataccaactaccagcttgcgtttgggacagatttgaatcaacattgaaccataatacattaggtggtaagtgtaatagaggcttgtctgtcatcgacagtgtcagattattgagagatggtttagagttgagtccagcagaatatttcgatgccgcggtattaggttggctcgtggaactattgcaagcaactatgttagttttagacgacattatggacggcagtccaaccagaaggggtaagccctcttggtacagagtgcccggtgtcggtatggcagcagttaatgatgccaccatgttggagagcgctatttacatgctattaaagaaatattttgccgggagggcgatatatttgcctgttgttgacttatttcatgaaacagcactgcagatcgagttaggtcaagctttcgacatgttaatagctaatgaggggaccccagatctcacaactttcgtacccgctacttatagtcagattgtaacctataaaaccgcgttttattcgttctatcttcctgtggccctggctttacacgctgttgatgcggcaacacctacaaatctggccgccgcaagggcaatattggtaccaatgggtgagtattttcaggtccaagacgactacctagactgctttgcagatccaacggttctagggaaggttggcacagatattattgagggtaaatgttcttggttggtggttcaggcactacagagagcatcaaccgatcaagctcaattgctggctgaaaattatgggtccgcctctggtgagtcctccgtgaaagcactatattcagaactggatttagaaagtgtctataggacatttgaagagcagagagttgcggaattgagaaccttgattacgggactggacgaatcgcaagggttaaggaaatctgtctttgaggaactgcttggtaaaatttatcaaagacgtaaa

SEQ ID NO: 927 - DNA, 1212 bp, Penicillium aethiopicum
atgcagtataaactagcattaaatgggaaaactctaaagggcgaaaccactacggaagcagtagatgctgccacggcggaaaaagttttcaagcaatacgccaacgataatggcgtggacggggaatggacctatgatgatgcgacaaagacttttactgtcacggaggcaaccagcacgacaacttctttaaaggaatttttgtcagttttcccacagcttgtggccgatttgcgtgcattatgtttggaggaataccaactaccagcttgcgtttgggacagatttgaatcaacattgaaccataatacattaggtggtaagtgtaatagaggcttgtctgtcatcgacagtgtcagattattgagagatggtttagagttgagtccagcagaatatttcgatgccgcggtattaggttggctcgtggaactattgcaagcaactatgttagttttagacgacattatggacggcagtccaaccagaaggggtaagccctcttggtacagagtgcccggtgtcggtatggcagcagttaatgatgccaccatgttggagagcgctatttacatgctattaaagaaatattttgccgggagggcgatatatttgcctgttgttgacttatttcatgaaacagcactgcagatcgagttaggtcaagctttcgacatgttaatagctaatgaggggaccccagatctcacaactttcgtacccgctacttatagtcagattgtaacctataaaaccgcgttttattcgttctatcttcctgtggccctggctttacacgctgttgatgcggcaacacctacaaatctggccgccgcaagggcaatattggtaccaatgggtgagtattttcaggtccaagacgactacctagactgctttgcagatccaacggttctagggaaggttggcacagatattattgagggtaaatgttcttggttggtggttcaggcactacagagagcatcaaccgatcaagctcaattgctggctgaaaattatgggtccgcctctggtgagtcctccgtgaaagcactatattcagaactggatttagaaagtgtctataggacatttgaagagcagagagttgcggaattgagaaccttgattacgggactggacgaatcgcaagggttaaggaaatctgtctttgaggaactgcttggtaaaatttatcaaagacgtaaa

SEQ ID NO: 928 - DNA, 1080 bp, Ocimum basilicum
atggcaaagtcgcccgagaccgagcacccggttaaggccctcggttgggctgctaccgataactctggaaccttctctcctttcaacttttcgagacgtgctaccggcgagcgcgatgtacaatttagagtcctgtactgtggagtgtgccacagtgatctgcatatggtgaagaacgaatggggtgttacccattaccctattgtgcctggacacgagatcgtcggtatcgtgactgaggtcggttccaaggtggagaaggtgaagatcggagacaaggtgggtgtgggcgtcctggttggatcctgtcgacaatgtgaccagtgttcaaatgacctggagaattactgttacaaacagattctgacatacggagcgccctatcttgacggcacgatcgcccgtgggggatactcggacattatggtcgcagacgagcatttcatcattcgctggcccgagaactttccgcttgatgctggcgccccgctcctttgtgccggtatcactacgtacagccccctgaagtacttcggcctggataagcccggactccgagtgggcgtgaatggccttggaggcctgggtcacgttgctgtcaagtttgctaaggccttcggaaccaaggttactgtgatcagtacctctctttccaagaaggaggaggctatgcagcacctgggtgtggacgagtttgttgtctcaaccgatccccagcagatgcaggcagctgtgggcactttggacggcatcatcgacacggtttctgcaccgcatcccatcgtccctctgctgtcactcttgaagcctcacggcaagctaattgttgtgggcttgccggataagcccctgcagctgccagtgttcccactcatccagggccgacgcacgatcgctggatctggtattggcggactgaaggagacccaggagatgattgattttgctgcaaagaataacatcgtcgctgatgtggaggtcatccccatcgactacatcaacacggctatggatagactgctgaagtccgatgtcaagtaccgcttcgtcatcgatgtggagaagtcgctcaagccccag

SEQ ID NO: 929 - DNA, 1641 bp, Catharanthus roseus
atgtcctctagctctagctcatcatcaagtatgtctctgccactggcgacacccttgataaaggacaacgagagcctaatcaagttcctaagacaacctctggttctgccgcacgaagtcgatgactcaacaaaaaggagagagctgttggagagaactaggaaggaactggaactgaatgcggagaagcccctagaagcgttgaaaatgatcgacattatccaaagactaggtctttcctatcatttcgaggacgatatcaactctattttgaccggcttttccaacattagtagccagacccatgaagacttattaacggcatccctatgcttcaggttattgaggcacaatgggcataaaattaacccggatattttccaaaaatttatggacaataacggtaaattcaaagattccctaaaagatgacaccctagggatgctgagcttgtatgaggcgtcatatttaggcgccaacggagaggaaattctaatggaagcgcaagagttcacgaagacacacctgaagaattccctacctgccatggcacctagcttgtcaaagaaggtgtcacaagcattggagcaaccgagacacagaagaatgctgagattagaagcaagaaggttcattgaagaatacggcgcagagaacgaccacaatccagacttgttagaactagcaaaacttgattataacaaggttcagtccttacatcagatggaattgtctgagataactcgttggtggaagcagctaggtttggtggataagctgacgttcgctcgtgacaggccgttagagtgtttcttgtggacggtggggcttttgccggaaccgaaatacagtgggtgtagaatagagctagctaagaccattgctatcctgctagttatagacgatatatttgacactcatgggaccttagatgagttgctattgttcactaatgcgatcaaaaggtgggatttagaggcaatggaggatctgcctgagtatatgcgtatatgctacatggctttgtacaatactacaaacgaaatttgctacaaggtcttaaaagagaatggctggagcgtgcttccatacttaaaagcgacgtggatagatatgatagaagggtttatggttgaggcggaatggtttaattcagattacgtaccaaacatggaggagtatgttgaaaacggtgttagaaccgcggggagttatatggctttagtacatttgtttttcctgataggccagggtgtcacggaagataacgtaaaattgcttataaaaccctatcctaaacttttttcctcatccggccgtatacttagattgtgggatgatctgggcacagcgaaggaggaacaagaaagaggtgacttagcgagttctattcagctttttatgagggaaaaagaaattaagtcagaagaagagggtagaaaggggatccttgagattatcgagaacctgtggaaagagttaaatggggagttggtttaccgtgaagaaatgccacttgccattatcaagactgcatttaacatggcgcgtgcatcacaggttgtctaccagcacgaagaagacacctacttctctagtgtcgataactacgtcaaggctcttttcttcactccctgtttc

SEQ ID NO: 930 - DNA, 1515 bp, Ocimum basilicum
atgcagcatatggaagaatcaagcagcaagagaagagagtatcttctagaagagacaactaggaagttacagcgtaacgataccgagagcgttgagaaattgaaattaatcgataacatacagcaattaggcataggctactatttcgaagacgcaattaatgcggtattaaggagtccctttagtactggtgaggaagaccttttcacagccgctctgcgttttaggcttcttaggcataacggtatagagattagtcccgaaattttcttgaaatttaaagatgaaagaggtaagtttgacgaatctgacacacttggattactgtccctgtatgaggcaagcaatttgggcgttgctggcgaggaaattttagaggaggcgatggaatttgccgaggcaaggctacgtcgttcattatcagaaccagccgcccccttacacggtgaagtggcccaagccttagacgtaccgaggcacctgaggatggccagactagaagcacgtaggtttattgaacagtacggaaagcagtccgaccatgacggggacttactggagttagctatcctggattacaaccaagtgcaggcacaacatcaaagtgagcttacggagattattagatggtggaaggaactgggcttggtagataaactaagctttggaagagatagaccccttgaatgcttcttatggactgtcggactgttacccgagcccaaatatagctccgttcgtatcgagttagcaaaggctatctccatcttacttgttatcgacgacatctttgacacgtatggtgaaatggatgatttaatactgttcactgatgccataaggagatgggatctagaggctatggagggattgccagaatacatgaaaatatgctatatggccctatataacacgactaatgaagtttgctacaaggttcttagggacacgggccgtatcgtgctgttaaacctgaaatcaacatggatcgatatgatcgaaggcttcatggaggaagcaaaatggtttaatggcggttctgcacccaagttagaggagtacatagagaatggtgtgagcacggctggcgcttatatggcgttcgctcacattttctttctaattggagagggagtcacccaccagaactctcagctatttacacagaagccctacccgaaagtattttctgctgccggtagaatattgagactttgggatgatttaggaactgcgaaggaagaacaggaaaggggcgacttggcctcatgtgtgcagctgtttatgaaggaaaaaagtttgacagaggaggaggcaagatcaagaatcttagaggagataaagggactttggagggaccttaatggcgaactggtttataataaaaatttaccactttctatcatcaaggttgccctgaatatggctcgtgcgtcccaagtggtctacaaacatgaccaggatacttactttagctccgtcgacaattacgtagatgcgctgttcttcacgcag

SEQ ID NO: 931 - DNA, 1521 bp, Valeriana officinalis
atgattatggaacttgtggaagcgactcgtaggaccttaaggaatgagtcatccgatagtaccgaaaagatgagactgattgactctttgcagaggcttgggttgaatcaccattttgagcaggatataaaggaaatgttgcaagactttgccaacgaacacaagaatacaaatcaggacctattcacgactagcctgcgttttaggctgttgagacataatggctttaatgttactccggacgttttcaataaatttacagaggaaaacggtaaatttaaggaatcactaggcgaggataccatcgggattctgtcactatacgaggcaagctatttagggggtaaaggtgaggagatactaagcgaggccatgaagttctccgaatccaagctgagggagtcaagtggtcacgtcgctccccacattcgtagacagatttttcaatccttggagctgccacgtcacctgagaatggctaggttggaatccaggcgttacatagaggaggattactcaaatgagatcggggctgatagctccttactggagctagctaagttagacttcaacagcgtccaagccctacatcagatggaattaacagagatctcaaggtggtggaaacaacttgggctgtcagacaaattgcccttcgcaagagatcgtccgctggaatgttttctgtggaccgtcggattgctaccagagccaaaatattccggatgtcgtattgagttggctaaaacaatagcggtattattggtgatagacgatatttttgatacctacggatcatacgaccagctaatattgtttacgaacgccattagacgttgggatttggacgcaatggacgagttgccggagtacatgaagatatgttatatggcattatacaatactaccaacgagatttgctacaaagtacttaaagaaaacgggtggtcagtccttccctacttagagcgtacttggattgacatggtagaggggttcatgttggaagccaaatggcttaatagcggggaacagccaaatttggaggcttacatagagaacggggtgacaaccgcggggtcttatatggcgcttgtgcatctgttcttcttaattggggatggcgtgaacgatgaaaacgtaaaactgctactagatccttatccaaaacttttttctagtgccgggcgtatccttagactttgggatgacctgggcaccgccaaagaagaacaggaaagaggagacgtttcatcatccatacaactttacatgaaagaaaaaaatgtacgtagtgagagcgaagggagagagggcatcgtagagataatctataacctttggaaagacatgaacggcgaactaatcgggtccaacgcgctaccccaagcaataatagaaacaagctttaacatggcgaggactagccaggtggtctatcaacacgaggacgacacatatttctcctcagttgacaattacgtccagagtctgttcttcaccccagttagcgtgtccgtg

SEQ ID NO: 932 - DNA, 1641 bp, Catharanthus roseus
atgagctcctcatcctcttcaagctcatcaatgagcctaccactagctactcctttaataaaggacaatgaatcattgattaagttcctacgccaaccacttgtattaccacatgaggttgacgattctacaaagcgtagagaattactagagcgtacaagaaaagaacttgaattaaacgctgaaaagcctctagaagctcttaaaatgatagatattattcagcgcttgggattatcatatcattttgaagatgatattaattctattctaaccggtttttcaaatatctcaagtcaaacacacgaagacttattgactgcttctttgtgcttcagattgctccgtcacaacggtcataaaataaatccagatattttccaaaagttcatggataataatggtaaattcaaagactctctaaaggatgatacgttgggtatgttatcactgtatgaagcctcttacttgggagctaatggcgaagaaattctaatggaagcacaagaattcacgaagactcatctgaagaacagtctacctgcaatggcaccttctctaagtaaaaaggtgtcacaagctcttgagcagcctagacacagacgaatgttgagattagaagctagacggttcatagaagaatacggtgccgaaaatgatcataatcctgatttgctagaattggcgaaattggattataataaggtgcaatccttacatcaaatggaactctctgagattacaagatggtggaaacaattgggcctagttgataaattaactttcgccagagacagacccttagagtgttttttgtggactgttggcttattacctgaaccaaaatacagcggatgtaggattgaattagctaagacaatcgctatcttattggtaatagacgacatttttgatactcacggtaccttagatgaacttctattatttactaacgccataaagagatgggatttagaagctatggaagacttacctgagtatatgcgtatctgttatatggctctttataacaccactaatgagatttgctataaagtcctgaaggagaatggatggtcagtattaccatatttgaaggccacatggatagacatgatcgagggttttatggtcgaggctgaatggtttaactccgactacgtgccaaacatggaagagtatgtagaaaatggtgtgcgtactgcaggtagttacatggcgctggttcacttattttttttgattggacaaggggtaactgaagataatgtcaaattattgatcaaaccctacccaaaattatttagcagttccggaagaattttacgcctttgggatgatctcggtactgcaaaggaagaacaagaaagaggggacctcgcttcatctatccaattgtttatgagggaaaaagaaattaaaagtgaggaggaaggtcgaaaaggtattttagaaatcattgagaatctatggaaggaacttaatggggaactagtttatcgtgaagaaatgccgctggctataattaagactgcattcaatatggctagggcgtctcaagtagtctatcaacatgaagaagatacttatttttccagcgtagacaactacgttaaggcactattctttacaccgtgtttc

SEQ ID NO: 933 - DNA, 1515 bp, Ocimum basilicum
atgcaacacatggaagaatcttcctctaaaagaagggaatacttgttggaggaaactactcgcaaattacaaagaaatgatacagaatcagttgaaaaactaaaacttatagataacattcaacagttaggcattggctattatttcgaagatgcaattaacgccgtgttacgttcacctttctcaacaggagaagaggatttatttactgccgcattaagatttagactgttgagacacaatggtatcgaaataagccccgagatattcttaaaatttaaggatgaaagaggaaagttcgatgaatctgatacattgggccttctatctttgtatgaagcaagtaacctcggtgtagcaggggaggaaattttggaagaggctatggaattcgccgaagcgagattgagacgtagcttatctgaacccgctgctcctttacacggtgaggtcgctcaagcattggatgttcctcgacatctcaggatggccaggcttgaggctagaagatttatagaacagtatggtaagcaaagcgatcatgatggcgacttactggagttggctattttagactataatcaagtgcaagctcaacatcagtcagaactaaccgaaataattagatggtggaaagaattaggtttggttgacaagttgtctttcggtcgtgatagaccgctcgaatgttttttgtggactgttggtttgttaccagaacctaaatattcatccgttcgtatcgaactggcaaaagcgatttctatattgttagtaattgatgacatcttcgacacatacggtgagatggacgatcttattttgttcactgatgctattagacgctgggatttagaggccatggaaggtctacctgagtatatgaagatttgttacatggccctctacaatacaaccaatgaggtttgttataaagtcttacgtgacacgggtagaatagtcttgttaaatctcaaatctacatggatagacatgatcgagggttttatggaagaagctaagtggttcaatggagggagcgcacccaaacttgaggagtacattgaaaatggtgttagtactgctggggcgtacatggcctttgcccacattttttttttgattggtgaaggtgttacccatcagaattctcaacttttcacgcaaaaaccatatcctaaggtttttagcgcagctggtagaatattgcgtttatgggatgatttgggcacagctaaagaagaacaggagcgtggcgacttagcctcttgtgttcaactttttatgaaggaaaagtcgcttacagaggaagaagcgagatcgagaatactggaggaaatcaagggtttgtggagagacctaaacggggaattggtgtacaataaaaatttaccgttatcgattattaaggtggcgttgaacatggccagagcctcccaggtagtgtataaacacgaccaagatacctatttctcgtcggttgacaactatgtcgacgctttattctttacacaa

SEQ ID NO: 934 - DNA, 1521 bp, Valeriana officinalis
atgataatggaattggtggaagctactcgtagaacattgagaaatgaatctagtgacagtacagaaaaaatgagattaatagatagcctacagaggcttggcttgaatcatcattttgaacaagacattaaagaaatgctccaagattttgctaatgaacataagaatactaaccaagatttgtttactacttcgttgcgctttcgtttgcttagacataacggatttaacgtcacacctgatgtgttcaacaaatttactgaagaaaatggaaaatttaaggaatccttgggagaagatactattggtattctgagtctatacgaagcaagttatttgggtggtaagggggaagaaatactcagtgaagctatgaagtttagcgaaagcaaactacgtgaatcttctggtcacgtagccccacatattcgtaggcaaatattccaaagcctagaactccctagacatttacgaatggcacgacttgaatccaggaggtatattgaggaggattattcaaacgaaattggtgctgatagttctctgttagagttagcaaaattggattttaattccgttcaggcactgcaccaaatggaactgacagagatttccagatggtggaagcagttagggctgtccgacaaattgccttttgccagagacagaccactagaatgtttcttgtggactgtcggtttactaccagaaccaaaatattcaggttgtagaatcgaacttgcgaaaactattgcagttttattggtgatcgatgatatattcgacacctatggatcttacgatcagctcatattattcacgaacgcaattagaagatgggatttagatgccatggacgaacttccggagtacatgaagatatgctatatggctctgtacaacacaactaacgaaatatgctacaaagttttaaaggaaaatggttggtctgtattaccttacctcgagagaacatggatagacatggtagaaggatttatgcttgaagcaaaatggctaaactctggagagcaacctaatcttgaggcctacatcgaaaatggggtaacaacagccggctcatatatggcgctggtgcacctttttttcttgataggagatggcgttaatgacgagaacgttaagttgttgttagatccttaccctaagttgttcagctcagcaggaagaatcttgagattgtgggatgatttagggacagctaaggaagaacaagaaagaggagatgttagctcttccatccaattatacatgaaggaaaagaatgtgcggagtgagtcagaaggaagagagggtatcgtcgaaataatatacaatttatggaaagatatgaatggggaactcattggttctaacgccttacctcaagcgataatcgagacctcattcaacatggctagaacatctcaagtagtttatcaacatgaagatgatacttatttttcatctgtggataattatgtccaaagtttgttctttactccagtttccgttagtgtc

SEQ ID NO: 935 - DNA, 1641 bp, Catharanthus roseus
atgagttcgtcatctagttcatcatcgtcgatgtctcttcctttggccactccattgattaaggacaacgaatcattgattaagtttctacgtcaaccactagtgctcccacatgaagttgatgattccacaaaaagacgagaattacttgagaggaccaggaaagaattagaactgaatgctgaaaagccactagaagccttgaaaatgatcgatataatacagagacttggtctgagttaccacttcgaagatgacattaactctattttaaccggtttctctaacatctcgtcccaaacccacgaggatctgctaacagccagcctctgtttcagattactacgccataatgggcataaaattaaccctgacatatttcaaaaatttatggacaataacggtaaattcaaggactcgcttaaagatgataccttgggtatgttgtctctctatgaagcttcatatttaggagcaaatggtgaggaaatactaatggaagcccaagaatttacgaagacacatttaaagaattcattaccagctatggcaccatctttatcgaaaaaggtttcccaggccttggaacagccacgtcataggcgaatgttgaggctggaagcacggcgatttatagaagaatacggtgcggagaacgaccataatcccgatttgcttgagttagctaagttggattataataaggtgcaatctcttcatcaaatggaattatccgaaattactaggtggtggaaacaacttggactagttgataaattgacctttgcaagagaccgacccttagaatgtttcctgtggactgttggtttattgcccgagccaaagtattctggttgtaggatcgaactggcgaaaaccatcgccattctactagttattgacgacattttcgacacccacggtacattagatgaacttttgcttttcaccaatgctattaaacggtgggacctggaggctatggaagatttaccagaatatatgcgcatctgctatatggcattgtacaatacaaccaatgaaatatgctataaagtgttgaaagagaatggttggagtgtacttccctacctgaaagctacatggattgatatgatcgaaggctttatggttgaagccgagtggtttaactccgattacgtcccaaatatggaagagtacgttgagaatggtgtcagaacagcaggctcatacatggcgttagttcatctattctttctaatcggccaaggtgttacggaagataatgttaaactcttaattaaaccataccctaaattatttagctcatcaggtagaattctgagattgtgggatgacctaggcacggcaaaagaagaacaagaaaggggcgatttagcttcctctatccaactttttatgcgcgaaaaggaaatcaagtcagaagaggaaggtagaaaaggtatcttggaaattatagaaaacttgtggaaggagttaaatggtgagctggtctacagagaagaaatgccgttggccataataaagaccgctttcaatatggctcgagcttctcaggtagtttaccaacatgaagaggatacttatttctcgagtgttgacaactacgtcaaggccttgttttttactccctgcttt

SEQ ID NO: 936 - DNA, 1515 bp, Ocimum basilicum
atgcaacatatggaggaatcttcgtccaagagacgtgaataccttttggaagagacgacacgtaaactgcagcgtaatgatacagagagcgttgaaaaactcaagttaatagataacattcaacaattaggtattggatactacttcgaggacgcaataaacgcagttctgaggagtccgttctctactggagaggaagacctttttacagcagccttaaggttcagactactacggcataacggtattgaaatatctccagaaatatttcttaagttcaaggatgaacgtggtaaatttgacgagtctgacacactaggtcttctttcattatatgaagccagtaatttgggcgttgccggggaagaaatcttggaagaagcaatggaatttgcagaggctagactacgtaggtccctttcagaaccggctgcaccattgcatggtgaagtggctcaagctctcgatgtcccacgacatctaagaatggcaagattggaagcacgacgttttatcgaacaatacggtaaacaaagtgatcatgacggcgacctcttggaattagctatcttggactacaatcaggtccaagcccaacaccaatcagaactgacggaaattatacggtggtggaaggagctaggcttggttgacaagttatcatttggtagagataggcctctagaatgttttctatggacggtaggattactgccagaaccgaagtatagtagtgtgcgaatagagctggctaaagcgattagtattttactagttattgatgacattttcgatacatacggagaaatggatgatttaattttgtttactgatgcgattagaaggtgggatttagaagcaatggagggattgcctgaatatatgaaaatttgttacatggcactgtataataccacgaatgaagtctgctacaaagtgttaagagataccggtcgcattgttcttttgaacttaaaaagtacttggatagatatgatagagggctttatggaagaggctaagtggtttaacggaggatcggctcctaagttggaagaatacatagaaaatggagtgtctacagctggcgcttacatggcctttgcgcatatctttttcctaattggtgaaggagtcacacaccaaaactctcagctgttcactcagaaaccttatccaaaggtattttctgctgctgggagaatattgcgactttgggacgatttgggtacggctaaagaggaacaagagaggggtgatttggccagctgtgttcaactatttatgaaggaaaaatcgctaacagaagaagaagcccgttcaagaattctagaagaaattaaaggcttgtggcgtgacttgaatggtgaattagtatataataaaaatctacctttatctatcattaaggtagcgttaaatatggccagagcatcacaagttgtgtataaacatgatcaagatacatattttagttcagtggataattatgtagatgccttgttctttacacag

SEQ ID NO: 937 - DNA, 1707 bp, Perilla citriodora
atgtcttctaaagcggcctcctgcttgcgagcctcttgtagtttgcaattggatgtcaaaccggttcaggaaggtcgtaggtctgggaattaccaaccaagcatatgggattttaattacgtccaatcgttgaacactccatataaagaagaaagatatttaaccagacatgctgaattaatagttcaggtcaaaccattactcgaaaaaaaaatggaacctgcacaacaattggaacttattgacgatctcaataatttaggtctaagttatttctttcaagatagaataaaacaaattctttcgttcatttacgatgaaaaccaatgtttccacagtaacatcaacgatcaagctgaaaaaagagacttgtacttcactgcactgggttttagactgcttagacaacacggttttgatgtttctcaagaagtgttcgactgttttaaaaatgacaacggttccgattttaaagctagcctttccgataatacgaaaggtctacttcagttatacgaggcttctttcttagtgcgtgaaggtgaagatacattggaacaagcccgtcaatttgcaacgaaatttctaagaagaaagctggatgagatagatgataaccatttactgtcttgtatacatcacagtttagaaattccactccactggagaatccaaaggttggaagcccgctggttcctggatgcttatgctacacgccatgacatgaatcccgtaatattggaattagcgaagctggactttaacattattcaagccacgcatcaagaggaattgaaagatgtcagcagatggtggcaaaacactaggctagccgaaaagttgcctttcgtcagagatagattagtcgaatcttacttttgggctattgccttattcgaaccacaccagtacggctatcagagaagagttgctgcgaaaataattacgttggcaactagtatagatgatgtgtatgatatttacggaactttagatgaattacaactttttaccgacaactttcgtagatgggatacggagtccctagggcgccttccttactcaatgcaactgttttatatggttatccataattttgtgtccgaactcgcttatgagatcctgaaggaaaagggttttatcgtcataccatatttgcaaagatcctgggtagatctagctgagtcttttcttaaagaagctaattggtattattccggttatacgcccagtttggaggaatatattgataatggctcaatatctattggcgccgtggcagttttgtctcaagtgtacttcactcttgcgaattctatagaaaagcccaaaatcgaatccatgtataagtatcaccatatcttgagattgtccggcctgttggtaaggttacatgacgacttaggtacgtctctcttcgaaaaaaaacgtggcgatgttcccaaggcggttgaaatctgcatgaaggaaagaaatgttacagaagaagaagcggaagaacacgtgaaatacttgattcgagaagcgtggaaagaaatgaatacagcaactaccgctgcaggatgtcctttcatggatgaattaaatgtggcagctgcaaatctgggtagagctgcccaattcgtgtacttagatggcgacggtcatggtgttcagcattccaagatccaccaacagatgggtggcttgatgttcgaaccgtatgtc

SEQ ID NO: 938 - DNA, 1521 bp, Valeriana officinalis
atgatcatggagttagttgaagctactagacgtactttgcgaaacgaatcaagcgactccaccgaaaaaatgcgtttaatagactcattacagagactgggtttgaatcatcactttgaacaagatataaaggaaatgttacaagatttcgccaacgaacacaaaaatactaatcaagacttattcaccacttctctgcggtttagacttttaaggcataacggcttcaacgtaacgcctgacgtctttaacaaatttactgaagaaaatggtaagtttaaggagtcactaggtgaagatacaattggtatattatctttgtacgaggcctcttacctaggtggcaaaggagaggagattttgtctgaggcaatgaaatttagtgaatctaaattgagagaatcttcgggacacgtcgcccctcatattaggcgtcagattttccagtctctagaattaccaagacatttaaggatggcacgtttagagtcaaggcgttatatcgaggaagattactccaatgagattggtgctgattcttctctgttagaattggcgaaattggactttaatagcgtacaagcccttcatcagatggaattgactgagatatcgaggtggtggaagcaattaggtttatctgataaattaccttttgcgagagataggcccttggaatgcttcttatggacagtcggtctattgcctgaacccaaatactcgggttgcagaattgaattggccaaaaccatcgctgtcttgttggttatagatgacatttttgatacatacggttcttatgaccaattaatcttatttactaacgcaatccgcagatgggatctggacgctatggatgaattgccagagtacatgaaaatttgctacatggcgctttacaatactactaatgaaatatgttacaaagtactgaaggaaaacggatggtctgttttgccgtacttagagcggacctggatagacatggtcgaaggtttcatgttggaagcaaagtggctaaatagcggcgaacagcccaatttagaagcatatattgagaatggcgttacgaccgctggatcttacatggcattggttcacttatttttcctaatcggggatggagtgaacgacgagaatgtaaagttgttgctggacccataccccaagctattttcatcagctggaaggattctacgtttatgggacgatttaggtacggcgaaagaggaacaagagagaggcgacgtttccagtagtattcaattatatatgaaagaaaaaaacgttagaagtgagtctgagggtagagagggtatagtagaaataatctataatttgtggaaggatatgaatggggagttgattggtagcaatgcgttaccacaggctataatcgaaacttcatttaatatggctcgtacaagtcaagttgtatatcaacatgaagatgacacttacttttctagcgttgataactacgttcaatcacttttcttcacgccagtttccgtgagtgtt

SEQ ID NO: 939 - DNA, 450 bp, Rosa hybrid cultivar
atgggcaacgagaccgtggtcgtcgccgaaaccgcgggctctattaaagtagctgtagtcgtatgtcttttgaggggccagaacgtcttattgggaaggcgtagatcatctcttggcgatagtaccttcagtctacccagtgggcatttagaatttggggaatctttcgaggagtgtgctgcaagggaattaaaagaagaaaccgatctggacatcggcaaaatagaactgttgaccgtaacgaacaatctgtttctggacgaagcgaaaccttcccagtatgtggcagtctttatgagggcagttcttgcagatccaaggcaggagccgcagaacattgagcctgagttttgtgacggatggggttggtacgaatgggataatttacctaagcccctattttggcccctggacaacgttgttcaagatgggttcaacccatttccgaca

SEQ ID NO: 940 - DNA, 441 bp, Arabidopsis thaliana
atgtctacgggcgaggccatcccgagggtggctgtagttgttttcatactgaatgggaacagcatccttctaggccgtaggaggtctagtatagggaattctacattcgcgttgccgggtggtcatttagagtttggggagtctttcgaggaatgtgcggccagggaagtcatggaggaaacgggacttaaaatagaaaaaatgaagttacttacggtcaccaacaacgtattcaaagaggctcccactccctcacattatgtaagtgtttctataagagcggttcttgtagatcctagtcaggagcctaaaaacatggaaccagagaagtgcgaagggtgggattggtatgattgggaaaatcttcctaaaccattgttctggcctttggaaaaactattcgggtcaggtttcaacccattcacgcacgggggaggcgac

SEQ ID NO: 941 - DNA, 1806 bp, Catharanthus roseus
atgcagtataaactagcattaaatgggaaaactctaaagggcgaaaccactacggaagcagtagatgctgccacggcggaaaaagttttcaagcaatacgccaacgataatggcgtggacggggaatggacctatgatgatgcgacaaagacttttactgtcacggagagttcgtcatctagttcatcatcgtcgatgtctcttcctttggccactccattgattaaggacaacgaatcattgattaagtttctacgtcaaccactagtgctcccacatgaagttgatgattccacaaaaagacgagaattacttgagaggaccaggaaagaattagaactgaatgctgaaaagccactagaagccttgaaaatgatcgatataatacagagacttggtctgagttaccacttcgaagatgacattaactctattttaaccggtttctctaacatctcgtcccaaacccacgaggatctgctaacagccagcctctgtttcagattactacgccataatgggcataaaattaaccctgacatatttcaaaaatttatggacaataacggtaaattcaaggactcgcttaaagatgataccttgggtatgttgtctctctatgaagcttcatatttaggagcaaatggtgaggaaatactaatggaagcccaagaatttacgaagacacatttaaagaattcattaccagctatggcaccatctttatcgaaaaaggtttcccaggccttggaacagccacgtcataggcgaatgttgaggctggaagcacggcgatttatagaagaatacggtgcggagaacgaccataatcccgatttgcttgagttagctaagttggattataataaggtgcaatctcttcatcaaatggaattatccgaaattactaggtggtggaaacaacttggactagttgataaattgacctttgcaagagaccgacccttagaatgtttcctgtggactgttggtttattgcccgagccaaagtattctggttgtaggatcgaactggcgaaaaccatcgccattctactagttattgacgacattttcgacacccacggtacattagatgaacttttgcttttcaccaatgctattaaacggtgggacctggaggctatggaagatttaccagaatatatgcgcatctgctatatggcattgtacaatacaaccaatgaaatatgctataaagtgttgaaagagaatggttggagtgtacttccctacctgaaagctacatggattgatatgatcgaaggctttatggttgaagccgagtggtttaactccgattacgtcccaaatatggaagagtacgttgagaatggtgtcagaacagcaggctcatacatggcgttagttcatctattctttctaatcggccaaggtgttacggaagataatgttaaactcttaattaaaccataccctaaattatttagctcatcaggtagaattctgagattgtgggatgacctaggcacggcaaaagaagaacaagaaaggggcgatttagcttcctctatccaactttttatgcgcgaaaaggaaatcaagtcagaagaggaaggtagaaaaggtatcttggaaattatagaaaacttgtggaaggagttaaatggtgagctggtctacagagaagaaatgccgttggccataataaagaccgctttcaatatggctcgagcttctcaggtagtttaccaacatgaagaggatacttatttctcgagtgttgacaactacgtcaaggccttgttttttactccctgcttt

SEQ ID NO: 942 - DNA, 1680 bp, Ocimum basilicum
atgcagtataaactagcattaaatgggaaaactctaaagggcgaaaccactacggaagcagtagatgctgccacggcggaaaaagttttcaagcaatacgccaacgataatggcgtggacggggaatggacctatgatgatgcgacaaagacttttactgtcacggagcaacatatggaggaatcttcgtccaagagacgtgaataccttttggaagagacgacacgtaaactgcagcgtaatgatacagagagcgttgaaaaactcaagttaatagataacattcaacaattaggtattggatactacttcgaggacgcaataaacgcagttctgaggagtccgttctctactggagaggaagacctttttacagcagccttaaggttcagactactacggcataacggtattgaaatatctccagaaatatttcttaagttcaaggatgaacgtggtaaatttgacgagtctgacacactaggtcttctttcattatatgaagccagtaatttgggcgttgccggggaagaaatcttggaagaagcaatggaatttgcagaggctagactacgtaggtccctttcagaaccggctgcaccattgcatggtgaagtggctcaagctctcgatgtcccacgacatctaagaatggcaagattggaagcacgacgttttatcgaacaatacggtaaacaaagtgatcatgacggcgacctcttggaattagctatcttggactacaatcaggtccaagcccaacaccaatcagaactgacggaaattatacggtggtggaaggagctaggcttggttgacaagttatcatttggtagagataggcctctagaatgttttctatggacggtaggattactgccagaaccgaagtatagtagtgtgcgaatagagctggctaaagcgattagtattttactagttattgatgacattttcgatacatacggagaaatggatgatttaattttgtttactgatgcgattagaaggtgggatttagaagcaatggagggattgcctgaatatatgaaaatttgttacatggcactgtataataccacgaatgaagtctgctacaaagtgttaagagataccggtcgcattgttcttttgaacttaaaaagtacttggatagatatgatagagggctttatggaagaggctaagtggtttaacggaggatcggctcctaagttggaagaatacatagaaaatggagtgtctacagctggcgcttacatggcctttgcgcatatctttttcctaattggtgaaggagtcacacaccaaaactctcagctgttcactcagaaaccttatccaaaggtattttctgctgctgggagaatattgcgactttgggacgatttgggtacggctaaagaggaacaagagaggggtgatttggccagctgtgttcaactatttatgaaggaaaaatcgctaacagaagaagaagcccgttcaagaattctagaagaaattaaaggcttgtggcgtgacttgaatggtgaattagtatataataaaaatctacctttatctatcattaaggtagcgttaaatatggccagagcatcacaagttgtgtataaacatgatcaagatacatattttagttcagtggataattatgtagatgccttgttctttacacag

SEQ ID NO: 943 - DNA, 1872 bp, Perilla citriodora
atgcagtataaactagcattaaatgggaaaactctaaagggcgaaaccactacggaagcagtagatgctgccacggcggaaaaagttttcaagcaatacgccaacgataatggcgtggacggggaatggacctatgatgatgcgacaaagacttttactgtcacggagtcttctaaagcggcctcctgcttgcgagcctcttgtagtttgcaattggatgtcaaaccggttcaggaaggtcgtaggtctgggaattaccaaccaagcatatgggattttaattacgtccaatcgttgaacactccatataaagaagaaagatatttaaccagacatgctgaattaatagttcaggtcaaaccattactcgaaaaaaaaatggaacctgcacaacaattggaacttattgacgatctcaataatttaggtctaagttatttctttcaagatagaataaaacaaattctttcgttcatttacgatgaaaaccaatgtttccacagtaacatcaacgatcaagctgaaaaaagagacttgtacttcactgcactgggttttagactgcttagacaacacggttttgatgtttctcaagaagtgttcgactgttttaaaaatgacaacggttccgattttaaagctagcctttccgataatacgaaaggtctacttcagttatacgaggcttctttcttagtgcgtgaaggtgaagatacattggaacaagcccgtcaatttgcaacgaaatttctaagaagaaagctggatgagatagatgataaccatttactgtcttgtatacatcacagtttagaaattccactccactggagaatccaaaggttggaagcccgctggttcctggatgcttatgctacacgccatgacatgaatcccgtaatattggaattagcgaagctggactttaacattattcaagccacgcatcaagaggaattgaaagatgtcagcagatggtggcaaaacactaggctagccgaaaagttgcctttcgtcagagatagattagtcgaatcttacttttgggctattgccttattcgaaccacaccagtacggctatcagagaagagttgctgcgaaaataattacgttggcaactagtatagatgatgtgtatgatatttacggaactttagatgaattacaactttttaccgacaactttcgtagatgggatacggagtccctagggcgccttccttactcaatgcaactgttttatatggttatccataattttgtgtccgaactcgcttatgagatcctgaaggaaaagggttttatcgtcataccatatttgcaaagatcctgggtagatctagctgagtcttttcttaaagaagctaattggtattattccggttatacgcccagtttggaggaatatattgataatggctcaatatctattggcgccgtggcagttttgtctcaagtgtacttcactcttgcgaattctatagaaaagcccaaaatcgaatccatgtataagtatcaccatatcttgagattgtccggcctgttggtaaggttacatgacgacttaggtacgtctctcttcgaaaaaaaacgtggcgatgttcccaaggcggttgaaatctgcatgaaggaaagaaatgttacagaagaagaagcggaagaacacgtgaaatacttgattcgagaagcgtggaaagaaatgaatacagcaactaccgctgcaggatgtcctttcatggatgaattaaatgtggcagctgcaaatctgggtagagctgcccaattcgtgtacttagatggcgacggtcatggtgttcagcattccaagatccaccaacagatgggtggcttgatgttcgaaccgtatgtc

SEQ ID NO: 944 - DNA, 1686 bp, Valeriana officinalis
atgcagtataaactagcattaaatgggaaaactctaaagggcgaaaccactacggaagcagtagatgctgccacggcggaaaaagttttcaagcaatacgccaacgataatggcgtggacggggaatggacctatgatgatgcgacaaagacttttactgtcacggagatcatggagttagttgaagctactagacgtactttgcgaaacgaatcaagcgactccaccgaaaaaatgcgtttaatagactcattacagagactgggtttgaatcatcactttgaacaagatataaaggaaatgttacaagatttcgccaacgaacacaaaaatactaatcaagacttattcaccacttctctgcggtttagacttttaaggcataacggcttcaacgtaacgcctgacgtctttaacaaatttactgaagaaaatggtaagtttaaggagtcactaggtgaagatacaattggtatattatctttgtacgaggcctcttacctaggtggcaaaggagaggagattttgtctgaggcaatgaaatttagtgaatctaaattgagagaatcttcgggacacgtcgcccctcatattaggcgtcagattttccagtctctagaattaccaagacatttaaggatggcacgtttagagtcaaggcgttatatcgaggaagattactccaatgagattggtgctgattcttctctgttagaattggcgaaattggactttaatagcgtacaagcccttcatcagatggaattgactgagatatcgaggtggtggaagcaattaggtttatctgataaattaccttttgcgagagataggcccttggaatgcttcttatggacagtcggtctattgcctgaacccaaatactcgggttgcagaattgaattggccaaaaccatcgctgtcttgttggttatagatgacatttttgatacatacggttcttatgaccaattaatcttatttactaacgcaatccgcagatgggatctggacgctatggatgaattgccagagtacatgaaaatttgctacatggcgctttacaatactactaatgaaatatgttacaaagtactgaaggaaaacggatggtctgttttgccgtacttagagcggacctggatagacatggtcgaaggtttcatgttggaagcaaagtggctaaatagcggcgaacagcccaatttagaagcatatattgagaatggcgttacgaccgctggatcttacatggcattggttcacttatttttcctaatcggggatggagtgaacgacgagaatgtaaagttgttgctggacccataccccaagctattttcatcagctggaaggattctacgtttatgggacgatttaggtacggcgaaagaggaacaagagagaggcgacgtttccagtagtattcaattatatatgaaagaaaaaaacgttagaagtgagtctgagggtagagagggtatagtagaaataatctataatttgtggaaggatatgaatggggagttgattggtagcaatgcgttaccacaggctataatcgaaacttcatttaatatggctcgtacaagtcaagttgtatatcaacatgaagatgacacttacttttctagcgttgataactacgttcaatcacttttcttcacgccagtttccgtgagtgtt

SEQ ID NO: 945 - DNA, 1626 bp, Vinca minor
atgtcaatgccgttgtctatgtcacaacctattgccactccatttattacagataatgaatctctattaaagtttttaagacagccactggtcctcccacatgaagtagatgactctacaaagagacgagaattactagaaaggacaagaaaagagttgcaaatcagtgaagatcaacctttggaagcactaaaaatgatcgatactatagaaaggttgggcttagcatatcattttgaagaggacattaatagcctcctgaccggtttctccaatgcacaatccgacgaagacttgttgacagcatcattacgctttagattgctacgacacaacgggcacaagataaatccagatatctttttgaaatttatggataaaaatggtaaattcaaggaatctttaaaagaagagacattgggtatgttatctttatatgaggcaagctatttgggtgcaaatggcgaagacatattggagcaagctctggaatttactcaagcacacttgaaaaaaagcatctctggtgtcgcgccgccattatccaagaagatatcacaagccttggaattgccaagacataggaggatggcaagattggaagcgagacgttttatcgatgaatacggtggcgagtcagatcataatcctgatttacttgaattggctaagttagattataataaggttcaaagcttacatcaaatggaattatcagagatctctagatggtggaaacaattaggcttggtagataaactaacttttgctagagacaggccactagagtgctttctatggacagttggattgcttcctgaaccaaagtattctgcgtgcagaatcgaactagccaaaacgattgctatcttgctagtcattgatgacatattcgatactcatggtacactcgatgaacttttacttttcactaatgctattcgaagatgggatttagaagcgattgaggatttgcccgaatatatgaggatctgctacatggccctgtacaatactactaacgaaatatgctacaaagtcttgaaagaaaacggttggtcagtattgccatacctcaaggcaacttggatcgatatgattgaaggtttcatggttgaggctgaatggtttaacagcgattatgtcccaaatatggaagaatacgttgaaaacggtgttaccacagcaggctcttatatggcacttgtgcatctatttttcttaatggggcagggagtcaccgaggataacgttaaattattgttaaaaccatacccgaagttgttctcgtcctcaggtcggattttacggctgtgggacgacttaggaaccgccaaggaggaacaagaaagaggcgatttagcctccagcattcaactattcatgagagaaaaaaatattaaatccgatgaagaaggcagaaagtgtattttggaaattatagataagttgtggaaagagatgaatggtgaagttgtctcacgcaacaactccttacctctaccaatcattaaagttgcctttaacatggccagagcttcacaggtagtataccagcatgaagaagattcatatttttcttccgtagataattacgttcaaagcttgttttttacaccatttaat

SEQ ID NO: 946 - DNA, 1623 bp, Cinchona pubescens
atgtgtttaccctcccagaccttaacccaaccaatagcaacacctttaattacagataatgattctctactaaaatatttgaggcaaccacttatgctgccacatgaagtcgatgatagcactaaaaggaaagagttattggaaagaacgagaagagagttgcgttctacaaccgagccattggaagctatgaaattgatcgatacgctgcaacgattaggtattgcgtatcactttgaagatgatatgaacgtcatcctatcttctttcagttcagatggtcagtcagatgaagatttgtttacagcagctttacgctttagactacttagacataacggtcataaaatcagtcctgacatctttcaacgttttaaggatcacaaaggaaaatttaaagattcgttgaaagaggacactcttggtatgttatcactttatgaagcctcacacttaggagctaatggagaagacatcttatcagaggccatggagttttccgaagctcatttgaagaagagcttacctaagttggaacctttacctgctaagcatgtctcaaaagctttagaactacctcgacaccgtagaatggctagattagaagccagaagatacatagaagaatatggtaaagaatcgggacacaatcccgatcttttggaattggccaaattagactacaataaggtccaatcattacaccaaatggagttgagtgaaatcacaagatggtggaagcaactgggtttagtcgataaattaacctttgcacgggatagaccactagaatgcttcttgtggacagtaggcatattgcccgaaccaaagtattctagttgtcgtattgaattggctaagacgatagctatccttctggttatagacgatattttcgatactcatggtaccgtagacgagcttgtgctgtttactaacgcaatcagacgttgggatttagaagcaatggaagaattgcctgaatacatgaagatatgctatatggccctgtataatacgactaacgaaatttgttacaaaatcctaaaggaaaaaggatggtccgtgctgccctatctcaaaagtacatggattgacatgattgaggggttcatgatggaagcttcttggtatagtaatgctcaaatccctaacatggaggagtatgtggaaaatggagttacaacagcgggcgcatacatggcactagttcacctgttttttttgattgggcaaggagtcacacaagataatgtcaagttgctgatgaaaccttatcctaaacttttcagttcttcgggacggattcttagactgtgggacgaccttggaactgctaaagaggagcaggaaagaggagaccttgcatctagtatacagcttttcatgcgagaaaataacataacatgtgacgaggaaggcagaaagaggatattgctgcttattgataatttatggaaagatctcaactgggaacttgtatcaaggaacgaactgccactgagtattattaaagcagcttttaacatggcccgagcaagtcaagtagtataccagcatgaagaggactcttatttttcttccgtagacaattacgtgcaagcgttgttttttacaccgatc

SEQ ID NO: 947 - DNA, 1569 bp, Rauvolfia serpentina
atgaacttgtcactgtccttttgtgctaacctgtggtgttttcttatgagattaatgagaactacaagagggggtaattgttggaaagaacaagagaaaaatttgttgacatcagcagaccaaccactggaagcacttaaaatgatcgatactctacagagactaggtctagcgtaccattttgaggacgacattaattctatactcacaggattctcctcgtcacagtctgacgaagacctgttgacagcagctttgaggttcagactactacgtcacaacgggcacaagattagttcggatgtcttccaaaaatttatggataataagggtaaatttaaagagtcccttaaggaagatacactgggtttgctctctttatacgaagcttcctatcttggtgcaaacggtgaagatatcctaatgcaagctctagaatttacccaagcccatttaaaaaagtcattaagcggactagctccacctcttgccaaaaaaatttcgcaaggattagaattgccacggcatagaagaatggcacgtttggaggcccgtagatttattgaagaatatgggggtgagtcagaccataagcccgacctacttgagttggccaaacttgactacaataaagtgcagtccttacaccagatggagctaagcgaaataacccggtggtggaagcaattgggtttagttgataaacttacctttgcccgggatcgtcctttggaatgttttttatggactgttgggatcctacccgagcctaaattttcagcttgcagaattgagttagcaaaaactattgcaatattgctggttatagatgatatatttgatacgcatggtacaatcgacgagttagttttgtttacgaatgctataagacgctgggacttggaagccatggaaaacttgcctgagtatatgagaatttgttacatggctttgtataatacaacaaatgaaatatgttataaagtactcaaggaaaacggttggagcgttcttccttacttaaaggccacctggattgatatgatcgagggctttatgctagaagctcaatggtttaattcgggctatgtcccgaatatggaggaatacgtggaaaatggtgtaaccaccgccggagcttatatggctcttgttcacctatttttcttgatcggtcagggtgtaacacaggaaaacgttaagcttttggttcgtccttatccaaagttgttcagttcgagtggtaggatcttaagattatgggatgatttgggtactgctaaagaagaacaagaaagaggcgatctagcaagttcaattcaattatttatgagggaaaactcaatcacgtcagatgaagagggaagaaaacgtattttgcaaatcatcgacaacttatggaaggagttaaacggggaactgatgtcccggaatgcgctacccttggaaattgtcaaggcagccttcaatatggctagagcatctcaagtagtatatcaacatgaagaagattcttatttctcctcagtagataactatgttcaagcactgttttttacaccttttaac

SEQ ID NO: 948 - DNA, 1758 bp, Swertia japonica
atggtaataactagaaatttcgcaagtttttcggaagtatgtatcagttctggtaccctatttagctacctgagaaggcaatacaaccagtatccgatcgctaaaacttcgcatatatgtatgtgtatgccgttatccacatctacaatgtctagccaaccaatagcaacacctctcattaaagataatgaatctttgcttaggtatttgagacaaccaatggtcctaccacatgaattagatgatgatactaagcgtagggaattagtagagcgtacacgtagagagttgcaaagcatgagtaaaccccttgaagcaatgaagatgatcgatactttggatagattgggcattgcataccatttcgaggacgatattaacgctatacttacaaccttctctaaaaatgctcaacctaatgaggatttattgacgacaagtttgaggttccgtctgttgaggcacaacggttttaaaatttctccagaaatatttgaaaaatttttagatcaaaatggtaaattcgaagagtcattgacaaaagatatcccaggtttgatctcgctatacgaagcatcctatatgggtgcagggggcgaagaaatcttacttcaggcacttgaattttctgaaggccacttaaaatcttcaaagaacaatttaacccctcaactcagtcgccaagtatcgcaagctttagagctgcctagacatagacgtatggctagattggaagcaagaagatatatcgaagagtattctaaagagaaccaatataataatcctgacttgctggagcttgcaaaattggactataataaagtacaggctttgcatcagatggaacttacggaaattacaagatggtggaagcaattaggattggtggataaacttccatttgctagggatagacccctagaatgctttctatggactgttggtcttatgcctgaacctaaatattctggttgcagaattgaactggcaaaaaccattgcgatcctgttggtcatagatgacatattcgacactcatggcaccattgatgaattggtactattcaccaatgcaataagaagatgggacctaaaggccatggaagagctccctgagtatatgagaatctgttatatggccctatacaataccacaaacgagatttcatacaagattcttaaagaaaatggttggtcagtgcttccatacttaaaggccgtatggatcgacgtagttgacggattcatgatggaggcctcttggttttccaatggacaagtaccaaaagttgaggaatatttggaaaatggggttactaccgcagggagttacatggcactggttcatgtcttttttctaatcggtaagggtgttaccgaagaatccgtacaactactgatgaacccgtaccccaagctattttcaaatagcggtagtatcctgcgtctttgggatgatttgggaactgcgaaagaggaacaagaacgtggggatgtggcgtctattataatattgtttatgaaagaaaaaaacatcacttcagatgaggaagcaagagagtgcattctccagttaattcataacatttggaaggaattgaacggtgagctagtatctagaaacggtttacctcttgaaataaaaaaagtagctctgaacatggcaagagctagccaagttgtttatcaacatgaagaggatacttatttttcaaatgtcgataattatgttatggctttattctttactccatttaat

SEQ ID NO: 949 - DNA, 1440 bp, Coffea canephora
atgaatctaatcgatacattgcagagattaggcttggcgtatcatttcgaagacgatatgaatgctatcttaagccaactatcatccagtggacaatctgatggcgatttactgactacagctctaaggtttcggttattaagacataatggtcataaaatatcttccgacattttccaaaagttcatggataaaaacggcaaattcaaggactctctcaaggaagatactatgggcttattgtctttgtacgaggcctctcaccttgcggctaacggcgaagacatcttgttggaagccatggagttgacggaagcacacctcaagcaaagtttaccatctctgcccacacagttggctaggaaggtgtcctctgcattagaactgcctcgtcataggagaatggcaagactggaagctagacgctatatacaagaatatagcgaagaaattggtcatgatccaaatctgcttgaactggcaaaattagactacaataaagttcagagtttgcatcagatggaattaacggatatttctaggtggtggaaacagctcggcctcgttgataagttaacattcgcaagagatcgtccattggagtgtttcctatggacggttggaattttaccggaaccaaaatattcaaactgccgaattgaactagctaaaaccatagcaattttattggtaatagatgatatatttgatacacatggcactatagacgagttagttttgtttacgaatgctattagaagatgggacttggaggctatggaaggacttccagaatatatgagaatttgttatatggctttatataatactaccaatgaaatatgttataaaatactaaaagaaaacggttggtctgttcttccatatttaaaggctacttggattgatatgatcgaaggtttcatgttggaggcaagttggtatagtaatggtcaagaaccaaatatggaggaatatgtcgctaatggcgttacgacggcagggacctatatggctatggttcatctgtttttcttaataggtcaaggtgttaccgaagaaaatgtaaagctcctaatgaaaccttaccctaagttgttctcctgttctggcaggattttgcgtttatgggacgatttaggtacagccaaggaagagcaagagagaggtgatctagcctcttctatccagctattcatgagggaaaataatataacttgtgatgaagagggtagaaaaaggattctccagttgatcgataacttatggaaagatttaaactgggggttggtcagtaggaacgctatgcctttggcgattattaaagccgcatttaatatggctcgttcttcacaggttgtatatcagcacgaggaggagtcatatttctcctccgtagacaattatgtggaatcgttattctttacaccaattataaac

SEQ ID NO: 950 - DNA, 1827 bp, Citrus unshiu
atgagagaaaaaatgattagttgtgaagaggaagcaagaaagcatatacgtcagttgatcagatcactttgggtggagctcaacggcatgctagtggcaccagctgctctgccggcttcaatagtcaatgcctctttaaatttagcaagaacagctcaagtcgtctatcaacatggagatgattcaacggttactagcgttaatggacatatcgaaaggcttttaaatggaggtaattgctggtctataaaggaggatgaaaaatttatggaattcgtcgatgactcactgctgcagttctgtaaaagaaaaatgcttaaataccagctagtctggttagttaacggacttgggctggctatcgaaaagatgatggtcagatggttgaccggggagtgctcattactggaagatctattttgttttgactgttgggacttaaaacatttttgtgtttcccgcgccgtcaagttgaagttagacatgctgggatgtaaaatggaagccacccctttccttgaaacttctggaggctcaggctacacaaggctggacaaaatcaacgtaggtaaggccgtagagtatatactaagttgtagaaatttggatggaggcttctggtggggtgtcagctgcagagcaaactatgcttcctatctcgccacgcaagatgaggatattctttttcaagctatggaatttactaaaactgaacttactcagtcagtttctttaatggattcccaatcatctaggcatgttgttcaagcattggcactaccaaggcatttgcgcatgtcacgatcagaagccggtaattacatcaacgagtattctcaatcgtggaatcatgatcaaaccttactgcaactggcaaaatctgactttaatatggtccagtcattacatcaaagggagctggcagaaattaagagatggtggaagcaactcggtctagtagataagttaggcttcggtagagatagacctttagaatgttttttgtggaccgttggaatctttccagaaccatactattctaactgtaggattgaacttgccaagaccatagccttgttgctagtaatcgatgatatttttgatacctacggtagtttgtccgatttggtcttgtttacggaagctattcaaaggtgggatcttggtgctatggaacacatacctgagtacatgaaaatttgttatatggcactctataatactacgaatgaaatttcatatagaattttaaaagatcatggttggaacgtagtgccgcaactaaaaaggacttggattgatatttttaaagcccaattgtcggaagcgaaatggttttcggagggctacgtcccaacacaagaacaatatctaagaaatggagtcactactggcggtacctatatggcacttgtccatgccttctgcttaatgggacaagatgttactaaggaaaccttggcaatgatggaaccttatcctaatctattttcatgctccggtaagatattgcgcctttgggatgatttaggagctgctagggaagagcaagaaagaggtgatgtcgcctcaagtatcgaatgttatatgagagaaaagacaatatcttgtgaagaagaagctcgtaaacatataagacaactgataagatccttatgggtagagttaaatggtatgttggtcgctccggccgccctcccagcatcgatagttaacgcgtcattaaacttagctagaactgcgcaagttgtttaccaacatggtgatgataacacagtaacatctgttaatggacatattgaacgcctgttttgcaatcctctaacc

SEQ ID NO: 951 - DNA, 1236 bp, Citrus unshiu
atgcaaccggaagagaacttgtttgagaatgcattagccttttatgtgtgcatagaggcatcttatttagcaactcaagacgaggatattctattccaagcaatggaatttaccaaaactgaattaactcaatctgtttcactgatggattcgcaatcatcgaggcatgtagtgcaagcattagctcttcccaggcacttgcgaatgagtagatctgaggcaggaaattatattaatgaatacagtcaatcttggaatcacgatcaaactctgttgcaacttgcgaaatccgattttaatatggtgcagtctttgcaccaaagagagttggcagaaattaaaaggtggtggaagcaattagggttagtagataagcttggctttgggcgtgatcgcccgttggaatgtttcctttggacggttggaatctttcctgaaccctactattcaaactgtagaattgaattagcgaagactatagcgctattactagttattgatgatatttttgacacttatggcagtttatctgatctggttctcttcactgaagctatccaacgctgggacttaggtgccatggaacatatccccgaatacatgaagatatgctatatggcattatacaacaccacaaatgaaatatcgtatagaatattgaaagaccacggctggaacgttgtgccccagcttaaaagaacatggatcgatatcttcaaagctcaactaagtgaggcaaaatggttttccgaaggttatgttccaacccaagagcaatacctccgtaacggtgtaaccaccgggggtacttatatggccttagttcatgcattctgtttaatgggacaagatgttactaaggaaactttggctatgatggaaccgtatcctaatttattttcgtgttcaggtaaaatattgcgcttgtgggatgatttgggcgctgccagagaagagcaggaaaggggagacgtcgcatcttcaattgaatgctacatgcgggaaaagactatcagctgtgaagaagaagccagaaaacacattcgccagttgatcagatctttgtgggtagaacttaacggaatgcttgttgcaccagcagcattaccagcttccatagttaacgcctcactcaaccttgcccggactgcgcaagtggtgtatcaacatggagatgacaatactgtaacttctgttaatggtcatatcgagaggttgttttgtaatccattaaca

SEQ ID NO: 952 - DNA, 1728 bp, Glycine soja
atgacaagttctctggagtcaatggaggcttgggcagctgcttctctggcacttacggtcagtagaagatccacgcaagctgctaaatctagtgtttacatcattaaggaaagacaagttgaaccaattgtaatttcaagaggtcgtagagaaaggttaaattatctggttccctcccaaacatatttgggtacaaaagatttagatcaggtcataagaaagggccaggaagctctgttgaactcctctgatcccttgcgtacactaaaaattattgatacaatacaaaaattaggcattgagcatcatttcgaaaaggaaattaacttgcagctaggacgtgtgggtgattgggacactgctgaagatctattcgctactgctttgcagtttagattacttcgtcataatggatggcctacttgtagcgatgtcttcaataagtttttagataagtccggcaactttaaggagtccgttacaagggacatttgggggatgctctcactgtacgaggccagttacttaggcgctaagggtgaagaagtgctacaacaagctatggattatagtagagctcatttgtgccaatcgttgcctcacttgagtcctaaagtacgcagtatagttgcggaagctctaaagctcccccgtcatcagagaatggttggattggaagcaaagaattatatggtggaatacagccaggcctctaatcaaattcccgccttgttaaaattagcaagattggattacgatatgatacagtccatgcaccaaaaagagttggctgagattagtagatggtggaaggacctaggtttaattgaacgactaggtttcggtagggacggtccaagggaatgtttcctatgggcattaggcatctttccagagccgaggcattcgagttgtaggatagaattagcaaaagcaatttgtgtattacaggtcatcgacgatgtctttgatacatacggcactttggatgaattggtgctatttaccaaggctatcaagagatgggatctagacgcgatggagcaacttccagagtacatgaagatctgctatatggccctgtacaacacaacccacgaaattgcatataagatccagaaagatcactctttgacagtagttgcttgtttaaaaattacatggatagatttgatagaggcttacttgaaagaagccaactggtttaataataaacacgtgccaacctttcaacaatacctagataacggtgttatatcttccggtagctatttggcactcgtccacgctaccttcctcataggggatgacctaagcaaagaaactatattcatgatgaacccttatccaagattgttctcctgctccggtaaaatactaaggttgtgggatgatctaggaacttcaagagatgagcaggaaaggggggataatgcttgctctattcaatgcctaatgaaacagaacaatatctcggacgaaaatgttgctcgtaaactaatacgtcagctaatcgataacttatggccagaattaaatggcttaactatgaccacgaatctaccattatcggtgatgagggcttcattgaacatggccagaactagccaagtgatttatagacatggtgatgaccaaaatatgccaactgttgacgaacatgttcaaacattattgtttaccccttcaataaactacagggacgaaaatgacattaatcatgttata

SEQ ID NO: 953 - DNA, 1626 bp, Cynara cardunculus
atgtgcttaagcttttctacccttccctcgtcaacaatagcagtgcccttaaatagggataatgatagtctcttacacgtttatcaaccgaaagcaatcttgccaaaggccgttgtttatgacagaatcgaacaacttaaagaaaacacgcgtagagctctgatgtccatctcagaccctattactagaatggagttgatcgataccatacaaagacttggggttggtcatcatttcgatgaagaaatgcatgagattttggaaaatttaacagaggatttgccagatgacaatttgtatgctgtagcactatgcttccgtttgcagaggcacaatggtctacatacgaacccagatgtcttccaaaattttatggatgctaatggtaaattcaaaatgtcatcctctgatgatattgaagttttgttgtccttatacgaagcttcctacttgggtgctaacggtgaagacattttatctcaggcaaaggaatttacgactatgcaacttacttcactagtgagtcaacttaatcctaagctaggcactaaggttttattgtctttgggcttacccagacaccttagaatgacaagactggaagcaagacggtacattgatgaatatggtaatgaagacgatcataatccaatcgttttagaattagccaagctggattataatcacgtgcaatccctattacaaagagaactggtggaggttactcgctggtgggaacatttaggtttattgaaaaaactgagctttgttcgggacaggcatttagaatgctttctatggacagtaggtgtattaccagagaaaaaatattctggtggtcgaatcgagttggccaagatcattgcgattttgttagtaatcgatgatatctacgacatttacggttcctatgaagatttggttttgtttacagaggctattcgaagatgggacctgtctgaaatggaacatttacccgaatatatgaagataagttatactgctttgtataatacaacttctgaaatatgtcacaaaatattaaaggagcatggtttatccgtcgaaccattccttcatcaaacctggatagatatggttgaagcttatatggttgaagtggaatgggtgcgatcagggacgatgcccactttcgaggattatattaagaatggggttaccacaagcggaacgtgtatggcgttagttcatttattctttttaatatcagaaggagttaccgaggaaaatatgagacacctgcttgacccttaccccaaattcttttccctcgctggcacgatactaagactatgggatgatttaggtacctcaaaagaagagcaagaaagaggtaacgttgcatcgtcgatacaattattaatgcgggaaaaaaatattacaagtgaagaagaaggtagaaagaaaatcttgcagttaatcaacgaattgtggaaagatcttaacacagaactggtgacgccagatgcgctgctcctacctatgattaaggttgcactaaacatgagtagggcatcccaagtggtttatcaacacaatgaagatagctatttgacctccgttgaatctcaagtacagtatttgttttttaaaccgattgatata

SEQ ID NO: 954 - DNA, 1452 bp, Dorcoceras hygrometricum
atgaagctgatcgataacttacaatggctaggacttgggcatcatttcgaagatgaaagcaacttgtggctggaaaagctgtcgggtgagagtgcatccgtagatgaagatgacttacactcaacggccttgttattcagactcttaagacaacatatgaaacctataaattgtgatattctggaaaaatttactagagatcaaaatatcagagactcattaattaaggacaaggaaggtttactgtccttatatgaagcttcctacctcggatcaaatgacgagggtgttttgtcagaagcgatgaaatttactgagactttattgatcaaatcaccagtcaggccagaatgcgatctctcgcagcggataggccgagcgctagaacttccaagacatcgtaggatggtacgtctcgaatcaaggagtcgtattaaggagtatggcatgcgaacttcacaaagctctagactgctgcaattggccaagttagattacaacaaagtacaattgttacatcaaatggagctagctcaatttactagatggtggaaacaactaggattggcagataagttgggatttgtacggaactctacggctgaatgtttcctttggacagtcggactattcccgcatcctaagtatagtggtgttcgcgttgaaatggccaaggttattgctatattgttagctatagatgatgttttcgacaagtacggcaccatgaacgacttatccttgttcaccctcgcaatccagaaatgggaccttgatgcgatagagactcttcctgaatatatgaagatgtgttttatggctttgtataatacaacaagggaaatcgcaaacaaagttttaaaagagcacggtgtagatattcatcatttcttggccagatcttggattgatactatcgaggcctttatgatcgaattcaaatggttttcccgaagagaagagccaatctcagctgaagattacatggaaaatggcgcagcaactgcaggtgcatatatggctctagtgcatgctttcttcttgatgggtgaaggtctaactaaccacaatatcaagcttatgtctaaaccataccctgaattattttctgcatccggaagaatactgagattgtgggacgatctggggacctctaaggaagaagaagatcgtggcgattccgcttccatcataggtatcctgatggaggagaagaacctatcatctgaaaatgaagctcgacaacatataaaacagactatcttaaacctgtggaaagatctaaatggaaatttaagtaccgactcgattaaccctttaccattgccaattatcaacgtctgttttaatatgtgcagaaccgcacaagtcttttatcaacaccaggaatactcttatgtttctaatgtcggtaggatggctgatgtcattttttttgaacacataggtatt

SEQ ID NO: 955 - DNA, 1554 bp, Dorcoceras hygrometricum
atgaaaagatcaactataggtattgaggaactgactgagaaggcacgtaaagaattgcagatcctaaattacatcgagcctgttcgtggtatgattttgattgataatttacagtggctaggtattggttaccatttcgaggacgaaattaatctatggttagataagctgagtgagtgggactgcggtgaagatgaccttcatgcaactgctctaagatttagacttctgagacaacaactaaggcctacaagttgcggcagtgtatttgagaacattctggaggatcacaaaaagagaaagagcaaaccttctctgaaccaagtcgaaggcttgctaaacttatacgaagcatcatatttgggtgcatcgggtgaggaaatattgtctgaagcgatgaaatttgctgaaacgcaactggctagcttggtgaacggcacatgtggtactgccgacggtaatttgtatcgaagaatctcacttgcattggaattgccaaggcaccatcgcatggtacgtttagaaagtagacgtcatattgaagattgctcaactcatattcattgctcaccatccatgcatctggtggagctcgcaaagctggattataacagagtacagttgctacacaagatggaattggaagaatttaggaggtggtggagacaactaggtttggtaggtgaattgtcatttgcaagggatccagaagcagaatgtttcttctgggttgttggttgcttccctgatcctagacattcgggtgttcgcatggaaatggctaagaccattgcaatcctcattaccatagacgatgtatttgataagcatggtacaattgacgagctattattgtttactcatgctgtccagcgatgggatgttgatgcaattgaaaatctgcctgattacatgaagatttgctatatggctctatacaaaacaactactgaaatcgctcaaaaaattttaaagcagcatggaatagacgttctacactttttgtctagagcatggattgacactattgaagcttacatgattgaagctaaatggttccagaacggccaaattccctcagtagaagattacatagagaacggtacaacaacgggcggatcttatatggctctagttcatgctttcttcctgatgggcgaaggtatcactaaccataatatgcagttgatgagaaagccatatccaaaactgttctccacaagcggtcgtatattgagactctgggatgatctgggcacaagcaaagaagaacaagacttcggcgataactccagtttgatcccagttttaatgaaagaaaagaatttgtcaagcgaggacgaagcacgcaggtgcatcaaacaatttattcgccagtcgtggggtgaattgaacaccaacctattagagtctaacatttggcctttatcactgattaatgtttgttttaacatgtgtagaacttcagaagcgatttaccatcaccaagagtcatcctacttgtcctcgttcaagaggacagccaagattaagttattagaaccaatcacgaat

SEQ ID NO: 956 - DNA, 1362 bp, Helianthus annuus
atgaacaccagcgattcgacaatgacgttaaagttgatagatactatccaaagattaggtgttggttactattatgaagaagaaatcaaaaagatcttaaaaaaattgacacatgtgctccccaaagatgatctatatacggttgcactgcactttcgcttgcaaagacactacggacttcataccaatcctgccgaagtatttcgtatctttatggatgaaaacggagaacttaaaaaatcaagttccgaggatattaaaggtgtgctcagcttatatgaagccagttgcttaggtagttcgggtgaagacttcttattgcatcacaaggaaattacacgtaggcatttatctagatctgtatcaaaactgtcaccaaagttgcacaagaatgtcgttgaaggtctcaagcttccgagacatatgagaatggaaagattagaagccagaagatatattgaggaatacggcaacgaagatgaccataacccattcgtattggaatttgccaagtggtgtgaacaccttggattattttgtaagttagtattcgtgagggatagacacgtcgaatgtttcttgtggacagttggcctgttgcctgaaccctctttctccggaagtagaattgaattggctaagactattgccataatgttagtcattgatgatatttacgacacctatgggtcttatgatgatttggtcctatttaccgaagctattaagagatgggatttgaatgctatagagcaactacctgagtatatgaagatatgttaccaggccttgtataacacgaataatgaaatctgtgacaaatggatagatatggctgaagcatatatggtagaagcagaatgggtaaagcgaggttcgatcccaaacttgaatgattacatagaaaatggtgttacaacttcaggaacctatatggcattagttcacctgttttttcttatttcttacgggctaaccacggaaaatatgaaacaccttttagatccataccccaaattcttcactatggccggtacaatcttacgtttgtgggatgacctaggtacaattaaagaagaagaggaacggggcgatatgttatctagcattcacctgcttatgaaagaggagaatattacgtgtgaagaagaagggagagagggtattctgcagatgatttatgcgttgtggaatgatttgaatgttgaattattgacgcctgatgcggttttgtttcccatgataaaagtggcacttaatatgtcaagaacatcacaagtggtttaccaacataatgacgactcctatctattgagtgtaaaggatcatgttcagagcttgttctacgaacctgttgatatc

SEQ ID NO: 957 - DNA, 1200 bp, Actinidia chinensis
atgctttctctgtatgaggcttcttatttgggtgcatatggagaagatatattgagtcacgctatggaatttactgactccaggttaaaacagtcagttccttttatggcaccacaactaggtaagcacgtttcacaagcattggaactccctagacatctacgcatggagagattggaggcttctagatttattgctgaattcgggagagaatccgatcaatcatctcaattgttggagttagcaaaaatggattacaacaaagttcaatctttgcatcagacagaactagctgaaataagtaggtggtggaaacaattgggcttagtggataaattgtctttcgggagggaccggcctttagaatgttacttatggtctgttggtttgctacctgaaccaaaatactcagactgtagaatcgagttagctaagacggttgcaatattgctggttatagatgacatttttgacacttacggttctcttgatgagctggttttgttcactcaagccattcgcagatgggatctgagtgctatggagcaattgcctcagtacatgaagatatgttacatggcattatttaacactaccaatgaaatcggttacaaggtactaaaagatcatggttggtccgttgttccacatttaaaaaggacgtggatcgatatgatagaagcatttcttgttgaggctaattggttttctaatggttacgttcctaacttggaagaatacctcgaaaacggcgttactactgctggtagctatatggctctagttcatttatttttcttgattggtaaaggggttacaaaggaaactataggtatgatggatccataccccaagctgttttcgtcttccggaaggattctacgtctttgggatgaccttggaacggcaaccgatgaacaggaaagaggagatgtagcttcttctatagactgcttccgtagggaaaaaaatttgtctacggagggtgaggcccgcaaccatgtaaaaaaacatatccgttctctatggaaagagctgaatggagaattaatggccccaaaggcgttacctctaccgttgatcaaaacatcattcaatatgtccagaaccgctcaggttatttatcaacatggggacaacaatacatttccatgcgttgacgactgtgtacaaagtttattctttactcctattggtttc

SEQ ID NO: 958 - DNA, 1623 bp, Cinchona ledgeriana
atgtgtatgcctagccaaacattaacccaaccaattgctactcctctgataacggataacgactccttactaaaatacttgagacaaccgctgatgttgcctcatgaagttgacgatagtactaaacgtaaagaattattggaacgtacgaggagggaactgagatcgacaactgaacctttagaagctatgaaattgatcgataccttacaaagattaggcatagcttaccattttgaggatgatatgaatgtcattttatcttctttttcttctgacggccaaagcgatgaagatttgtttacggcagcattgagattccgtctattgaggcacaacggtcataaaatctcccccgatatctttcagagatttaaagatcataacggaaagtttaaggatagtttaaaagaggatactttgggtatattatcgttatacgaagccagccacttaggcgcaaatggcgaagacatactgcttgaagctatggaattttcggaagcgcatctcaaaaaatcgcatccgaagttagaacctctgccagctaaacatgtatctaaggccctggaattaccaagacataggagaatggccagattagaagcaagaaggtatatcgaagaatacagtactgaatctggacacaacccagatttgctcgaacttgctaagttagattataataaggttcaatctctgcatcagatggagttgtcggaaattactaggtggtggaagcaattgggtctggttgataaacttactttcgcaagagatagaccactcgaatgcttcttgtggacagttggaattttgccagagccgaaatactcctcttgtcggattgaactagcgaagaccatcgctatcttattagttatagacgatattttcgacactcatgggacagttgacgaactagtactgttcacgaatgctatccgtcgttgggatctagaagctatggaggaactaccagaatatatgaaaatttgctatatggctttgtataacactaccaacgagatctgttataagattctaaaagagaaaggttggtctgtactaccatatctaaagtcgacttggattgacatgattgaaggctttatgatggaagcttcatggtactcaaacggtcaaattcccaatatggaagaatacgttgaaaacggtgttaccactgctggtgcctacatggcgttggttcatcttttttttcttattggtcaaggagtcactcaagacaatgtaaagttgctaatgaaaccttatccaaaattatttagcagctctggtcgtatcctgagactgtgggacgatttaggcacagctaaggaagaacaagaaaggggtgacttggccagttctatacaattgttcatgagagaaaataatattacatgtgacgaagaagggcgaaagcggattttgctacttatcgacaatttgtggaaagatttgaattgggagttagtttccagaaatgaacttcctttgtccataatcaaagctgcctttaatatggctagggcctctcaggtagtttatcagcacgaggaagactcttatttctcaagtgttgataattacgtccaggccctctttttcactcctata

SEQ ID NO: 959 - DNA, 1473 bp, Lonicera japonica
atgcaacaagaatcctcaaatccaacggataaacttaaacttatagatacattgcaaagactgggggtcgcctaccattttgaagaagacattaactctctcttacaaggtttttctaatggccaaccgaatgaaaacgaatacgatccctttacgactagtttgcgatttaggttgcttagacacaacggatatcacgttagtactgatgttttcaagaagttcatggacaaaaacggaaaatttaaggagagcctgggtggtgacttgatgggcatgttgtctctttatgaagcttcccacttgggtgcaaatggtgaagatattttatcggaggctatgaagtttactgaaaccaaattaaaagaatccgccgcgcacgtggctcctcaaattagaagacaaattttgcaatctctagaactaccaagacatttgagaatggcgcgtcttgaatcccggagatacattgaagaatatggcagggaatctggtcataatctggctttgctagaattagccaaattagactacaacaacgtgcaaagtttacatcaattagaacttgcagaaattagtagatggtggaagcatttagggctggtggataaattgacctttgctcgggacaggcctttagagtgttttttatggactgtaggtttgctacctgagcctaaacatagtggctgtagaattgagctagcaaaaacgatagccatactactagtaatcgatgatatcttcgatactcatggaagctttgatcaactggttctgtttaccaacgcaattagaagatgggatttgaatgctatggaggagctacctgaatatatgaagatctgttatatggcgctatacaacacgaccaatgaaatttgttacaaggtattaaaagaaaatggttggtctgttttgccttatcttaaaaggacttggattgatatgatagaaggtttcatgctcgaagcggagtggttgaactctggccatgttccaaacttggaggagtacattgaaaacggagtaaccacggctggtagctatatggcattagttcacttatttttccttataggtgaaggagtcacggatgacaacgtcaaactattattggatccatacccaaaactgttttcgtgttccgggagaattttaagattatgggatgatctgggtacagcgaaggaagagcaagagagaggtgatgttgcgtccagtattcaattgttcatgagagagaacaacgtgtcatctgaaggagaagccaggaagcaaatcattgaaatcattcagggactatggaaggaactcaacggtgaacttatgggccccaacgccttacctcttccaataataaaaacaagtttcaatatggctaggaccagtcaagttgtgtatcaacatgacgaagattcatattttagcagcgtagattcttatgtgcagtctttattcttcactcctatt

SEQ ID NO: 960 - DNA, 1671 bp, Cinchona pubescens
atgagttctaaaaaaccctcgcatatatgtatgtgtatgcccatgccgtctaccactagcacgcaactaattgctacaccgcttataagagataatgaatcacttttaaagtatttgagacaaccaatggttttgccacatgaagttcaacccatggtgttaccccatgaggttgacgacggtactatgagaaaggaactacttgagattaccagacgagaactaatctctactccggaacccttggaagctatgaaattgattgacactattcagagattaggattagcatatcacttcgaggatgaaatgaacgctatcctctctggcatatcaagtaagataccctatgaacacgaagacctcttaactgcgggattaagatttaggcttttacgtcacaatggacaaaagatttctcccgatatatttaaaaagtttatggattctaacgggaagttcaaagagtcattgaaggaggatactataggtttattatgtttatatgaagcttcacacatgggagcgaacggtgaagatatcttattagaagcgttagaattttcagagtccaacattagacgttctctttcttccctccagccacaattggcacgtaaagtctcacaggccttagaacttccacgtcacaggagaatgataaggttagaagctcggcggttcatcgaagaatatggtcaggagagtgggcataatcccgatctattggaattggctaaattggattacaacaaggtacagtctttacatcaaatggagctatccgagatttctagatggtggaagcaattgggtctggtggataaattaaccttcgctagagatcgtcctttggaatgtttcttgtggaccgttggtttgttgccagaacctaagtattccgcttgtcgaattgaactcgctaagacaattgctattttgttggtaatcgacgatatattcgacactcatggtacaatagatgagttggtcatgtttaccaatgcaataaggaggtgggatttagacgcaatggaagaactgccagaatacatgaggatttgctatatggccctatataacactaccaatgagatatgttataaggttttaaaagaaaacggttggtctgtactaccgtaccttaaagcaacatggatagatatgatcgaaggattcatgatggaagcttcatggtacaacaatgatgtggttcccaacatggaagaatatgtagaaaacggtgttactactgccggagcgtacatggcgttagtgcacttgtttttcttgattggtcaaggtgttactcaggaatctgttaagctccttatgaaaccataccccaaattgtttagttgttctgggaggatattgagactctgggatgacttgggcactgccaaagaggaacaggagcgaggtgatttggcgagttcaattcaactgttcatgaaagagaataatattaaaagtgatgaggaaggtagaaaggggatactacaacttatccacaacctatggaaggaccttaacagcgaactggtttcgaggaatgcaatgcctttggctataattaaggccgcgtttaatatggcgagggcttcacaggttgtctaccagcatgaagaggactcatatttttcctcagttgataattatgtaaaagca

SEQ ID NO: 961 - DNA, 1593 bp, Nepeta mussinii
atggctgctacaacaaccagtccaaatttggcgcccgtagtccataataacgatcatatgttagaaattgtagaatctactaaaaaacgtgaatatttggttgagaaaatcacagaaaaattaacagaagcaagctcggaaaagttaaaacttattgatgagattcagaggttgggtattggttatcatttcgaggatgtgatcaaatcaataatgcaagtccaatgttctgctttctctaccgaagaagatttgttcactactgctttgagatttaggttattgagacaagctggttttcacgttatacctgaagtgtttacccgttttaaggataagtccggaaactttaaggaatctttaggaggcgatacgctgggattgttgtctctatatgaagcctcccatattggcgttgatggcgagcgtatgttagaggatgctagacaatttacagaaagttacttgaggcaatcgttagccaaattggccccgagattaagaggtgaagtggggcaggcgttagaggtaccaaggcatcatcgaatggtccgtctagaggctcggagatttatacaagaatatgggaaacaatccggccatgatagagatttacttgaattagctattttggattataatcaggtccaagcacaacataatatggaattgaccgaaattgtaaggtggtggaaagagcttggattagttgataaattatctttcgccagagatcgccctttggagtgctttttatggtccgttgggctgcttccagaccccaagtattccaattgtagaatcgaactcgcaaaaaatattgctattttgttggtgattgatgacattttcgatacatacggtaaaatggatgatttaatcatatttacacatgcaatacgtagatgggatcttgaagcaatagaaacattaccagaatatatgaagatatgttacatggccttatacaataccaccaacgaaacatgttatagggttttgaaagacacaggtagatctgtattcccgtattttatttctacgtgggttgacatgattgaaggtttcatggttgaggcaaagtggttcaacggtggaatagctccaaatttagaagaatatatagaaaatggtgtttctactgctggggcttacatggctctggtctatcttttttttttaattggttatggtgtcacggaccaaaatgctagtttgcttattagaaagccctaccctaaactgtttagtgcggctggtcgtatcctacgtctgtgggatgatttgggtacggctaaggaagaagaagagaggggggatctagctagttctatacacttgttcatcaaagaaaagaatctaagtactgaagaagatgccagatctagaattttggaggaaattttcagattgtggaaggatctgaacggggaattaatctcagataataaggttctgccattatctataatcaaggtggctcttgatatggctagaagcagtcaagtagtatataagcatgaaggagataactatttcagtagcgtggacaactacgttgaagccctttttttcactccacttgtctcttca

SEQ ID NO: 962 - DNA, 1593 bp, Nepeta cataria
atggctgcaacgactacttcacctaacttagcacctgtagttcataacaatgaccacatgctggagatagttgaaagtacaaaaaagagggaatatttagtggagaaaataaccgaaaagcttaccgaggcttcatctgagaagctaaagttgatcgatgaaatacagaggttgggaatcggttaccatttcgaggatgttatcaacagcattcttcaagttcagtgctccgcattctctaccgaagaggatttattcacgactgctctcagattcagattgttacggcaggccgggttccatgttaccccagaagtttttacgcgtgttaaagacaaaagcggaaattttaaggaatcgttgggtggtgacacacttggtcttttatctttgtatgaagcttctcatattggagttgatggggaacgtatgttagaggacgcaagacaatttacggaaagttacttgagacaaagcttggctaaactggcgccacgattatgcagcgaagttggacaggctttagaggttccaaggcaccatagaatggtacgcttggaagccagacgttttgtacaagaatacggtaaacagagcggtcatgatcgtgacttgttagagcttgctatcttggattataaccaagttcaagctcagcacaatatggaactaacggaaatagttaggtggtggaaagagttgggtttggtagacaaactctcatttgcgagagataggccattggaatgttttttgtggtcagttggtcttctgccagatccaaagtactcgaattgtcgcattgaattagcaaaaaacatcgcaatacttcttgttatagatgatattttcgacacttatggcaaaatggatgaccttatccttttcactcacgctatacgtaggtgggacttggaggccatggaaacgctgccagaatatatgaaaatttgttacatggcgctgtataatacaacgaatgagacatgttacagagttctcaaagagaccgggcgcacagtatttccttattttaaatccacctggattgacatgattgaaggtttcatggtagaggccaaatggtttaacggtggcatcgagccaaaccttgaagagtacattgaaaatggagtctctacggctggtgcttatatggctttagtgtacctatttttcctgataggtgaaggcgtgactgatcaaaatgcttccctcttaataagaaagccttatccaaaacttttttccgcagctggtagaattttgcgattatgggatgatctgggtacagctaaggaagaagaagagcgaggagatctagcatcgtcgatacatctatttataaaagaaaaaaatctaagtactgaagaagacgctcggtcacgaatactcgaagagatcttcagactatggaaagatttaaatggagaattgatctctgataataaagtcctgccactcagcatcataaaagttgctttagacatggctagatctagccaagtagtttacaagcatgaaggggacacgtatttttcttcagtggacaattacgtggaagccttattcttcaccccattagtaagctcc

SEQ ID NO: 963 - DNA, 1530 bp, Nepeta cataria
atggaatctactaagaagagagaatacttactagaaaaaataactgaaaaattgcaaaagattacggaggcaagtgaaaaactgaagttaatcgatgaaatccaacgtcttggtattggttatcatttcgaagatgttatagataatattttacaggttcaatgcagcgctttcagtactgaggaagatttattcacaactgcacttagatttaggctgttacgacaagctggttttcatgttacacccgaagtatttactagggtgaaagacaagtcaggtaattttaaggaatctattggtggtgatactcctggcttattatcgctttacgaggcttctcatataggtgtagacggtgagaagatgttagaagatgcaaggcaacttactgagttctacctgaggcaatctctggcaaggttggcacctagacctcgtggcgaggtaggacaagccctcgaggtcccgagacatcatcgaatggtcaggttggaagcaagaagattcatcgaagaatatggtaagcaatcaggccatgatcgagatctactggaattggcaatcctcgattacaatcaggtgcaggctcaacataacatggagttaacagaaatcgtcaggtggtggaaagaattaggtttagttgataaactgagctttgctagggaccgcccattggaatgttttttatggagcgttggtttactgccagatccgaagtattccaactgcagaatagaattagcaaaaaatattgcaatattattggtcatcgacgatatatttgatacttacggaaagatggacgacttaattttgttcacacacgcaataaggagatgggatttggaagctatggaaaccttacctgaatacatgaaaatttgttatatggcgttatataatactaccaacgagacttgctatcgtgttttgaaagaaacgggtcgtactgtatttccttactttaagtccacttggatcgatatgatcgaaggtttcatggttgaagcgaagtggttcaacggtggtattgaacccaatttagaagaatatattgagaatggtgtttctacggctggtgcctacatggctttggtatacttattttttttaatcggagaaggagtgacagatcaaaatgcgtcattactcatcagaaagccgtatcctaaactgttcagtgctgcgggcaggattttaagattgtgggatgacttgggtacagcaaaagaggaagaggagagaggcgatttagcatcgtctatacacctattcataaaggaaaagaatttgtctaccgaggaagatgctagaagccgtatactcgaggagatctttagactctggaaagatttgaacggtgaactcatatccgacaacaaagttctcccattatctattatcaaggttgcattggacatggctagatcgagtcaagttgtatataagcacgaaggggatacctatttttcttcggtggacaattatgtggaggcattgttctttacgccactggtttcttcg

SEQ ID NO: 964 - DNA, 1626 bp, Phyla dulcis
atgtgtatgagtagttcggtttcattaccgacggccacgaccagttcatctgtaatcacaggtaatgacgcacttttaaaatatatcagacagccaatggtgattccacttaaagaaaaggaaggtactaaaagacgtgagtacctattggaaaagacagctagagaattgcaaggaactaccgaagccgctgaaaagttaaaatttattgataccattcaaaggctgggtatctcatgttactttgaagacgaaataaatgggatactacaggctgaactttcggataccgaccaattggaggatggtttgtttacgactgccttgaggtttagactgcttcgacattatggttatcaaattgctccagacgtgtttctgaaattcaccgaccagaatggaaaatttaaggaatcattagctgatgacactcaggggctagtttccttatatgaagctagttatatgggtgctaatggtgaaaatatactagaagaagcaatgaaatttactaagacccacttacaagggcgtcaacatgctatgagagaagtcgctgaagccttagaattgccgagacatctcagaatggccagattagaggcacgtagatacattgaacaatatgggacaatgatcggccacgataaagatttgctagaattagtaattttggattacaataatgttcaagctcagcatcaagccgaattagcggagattgcacgttggtggaaggagcttggtttggtcgacaaattaacgttcgccagagacagaccattagaatgttttttatggacagttggacttttgcccgagcctaaatacagcgcttgccgaatcgagcttgcaaagaccattgctattctgctcgtcatcgatgacatcttcgacacgtacggtaaaatggaagaacttgcattgttcaccgaggccattagacgctgggacttggaggctatggaaacattaccagaatacatgaaaatctgttatatggccttgtacaatactactaacgaaatatgttacaaagtcctaaagaaaaacggttggtcagtacttccttatttgcgttatacttggatggatatgattgagggatttatggtagaagcaaaatggttcaatggagggtcagcccctaatttagaggagtatattgaaaatggtgtttcgactgctggcgcctatatggctctggttcatcttttttttcttatcggagaaggtgtctcagctcaaaatgcgcagattttattaaagaaaccatacccaaaacttttcagtgccgcagggagaattttaagactgtgggatgatctaggtacggctaaagaagaagaaggccgcggtgatttggcttcctctatcaggctatttatgaaggaaaaaaacttgacgacggaagaagaaggaagaaatggaattcaagaggaaatttatagcttgtggaaagatcttaacggcgaattgatatctaagggtcgtatgcctttagctatcattaaggttgcactaaatatggcacgtgctagtcaggtcgtttataaacacgatgaagattcatacttctcttgcgtagataactacgtcgaagctttgttcttcactccactgctg

SEQ ID NO: 965 - DNA, 1563 bp, Vitis vinifera
atgtctgaggcagattcatccacaagacgcatgaaagaagtcaaggaacgaacctgggaagcattttatcgcgcttgggattcccgggcggcaatggaaatggttgataccgttgagcgattgggcttgtcttaccattttgaagatgaaatcaatgcattattgcagcgattctgtgattggaacgcaagtgaggacctgtttactacagccctccgattcaggttactaagacaaaatggctttcccactcatagtgatgtctttggtaaatttatggacaagaatggcaagtttaaggaatcgttgacggaagatatttggggcatgctttctctccatgaagctagccatcttggtgcaaagaacgaggaggtcctggctgaagctaaagaattcacaaggatccacttaatacaatcgatgccacatatggaaccccacttttcttctcatgtgggacgtgcattggagttaccacgacatctccgcatggtaagactagaggccagaaattatattggagagtattctagagagtccaatccaaatttggcattccttgagttagctaaattagattttgacatggtgcagtcattgcatcagaaggaacttgccgaaatagtgcgatggtggaaacaactagggttggtcgacaaactagacttcgcacgtgatagaccgatggagtgttttctatggacagtcggcatttttccagatccccgtcatagtagttgtagaattgaactaactaaagccatagctattttgctggttattgatgacatttatgattcatacggtagtttggacgaattggctttatttacagatgcagtaaaaagatgggaccttggagcaatggaccaattgcctgagtacatgaaaatttgttatatggctttatataatactaccaacgacatagcctaccgaattttgaaagagcatggatggagcgtgatcgaagacttaaagaggacatggatggacatttttggtgcattccttgccgaagcatattgtttcaaaggaggacatgtgccatcactagaagaatacttgactaacgctgtgacgacaggcggtacttacatggcattggtccatgcgttcttcctaatgggccagggtgtcaccagggaaaatatggctatgttaaagccatatccaaatatcttttcatgtagcggtaagatcctaagattatgggatgatttaggtacagcaagagaagagcaagaacgtggtgataacgcgtcgtcgattgaatgctacaagagagaacgggaaatggacaccgtattggaggacgaagcctgtcgaaaacatataagacaaatgattcaatctctatgggtcgaacttaatggcgaacttgtggcctcgagtgcgttgcctctctccataattaaggctgcttttaatcttagtcgaacagctcaagtcatttaccaacacggtgatgataacaaaacatcaagtgtagaggatcatgttcaggccttattattcagacctgtttcttccaatggtcacgcccaaatcactatgcac

SEQ ID NO: 966 - DNA, 1641 bp, Catharanthus roseus
atgtcttcttcgagtagctcttctagtagtatgagcttgcctttggccacccctctgatcaaagacaatgaatctctcattaaattcttgaggcaacccttagttttacctcatgaagtggatgatagtacaaaacgacgcgagttgttagaaagaacaagaaaggagttggagctgaatgctgagaagccactggaagcactgaaaatgatagatatcatccagaggctgggtctgtcctatcatttcgaggatgacataaattcaatactaacaggcttctccaatatctcttcacagactcatgaagacttattaacagcgtccctttgttttcgcttgttgcggcataatggacacaaaatcaatccagatatatttcagaagttcatggataataatggaaaatttaaagattcattaaaagacgatacattgggcatgctatccttgtacgaggctagttatctaggggcgaacggagaggagatactcatggaggcgcaagaatttaccaaaacccacttgaagaattctcttccagcaatggcaccatccctatcaaaaaaggtttctcaagctctggaacagccacgtcataggagaatgttgaggttggaggcaaggcgttttatagaggaatatggtgccgaaaacgaccacaatccggatttgctagaattggcaaagcttgactataataaagttcagagcctccaccagatggaactttctgaaattacccgctggtggaaacaattaggtctagttgacaaactcaccttcgccagagatagaccattggaatgttttttgtggacagttggcctattacctgagcccaaatattcgggatgtagaatcgaactagccaagacaatagcaattttgttggtcatagacgatatttttgatacccatggtacattagatgaactcttactatttacaaatgctattaaaagatgggatttggaggctatggaagaccttcctgaatacatgagaatctgttacatggcattatataataccactaacgaaatctgctataaggtcttgaaggagaatggttggtcggtgttaccatatttaaaagctacatggattgacatgattgaaggtttcatggttgaggcagaatggttcaactcggattacgttccaaatatggaagaatacgtagaaaatggagttcgcacggctggttcttatatggcactagtacatctcttcttcttgataggtcagggtgtcactgaagataacgttaaacttctcattaaaccttatcccaaattgtttagtagttctggaagaatcttgagattatgggatgatttgggcacagcaaaagaagaacaagaacgcggggatcttgcgagtagcattcaattgtttatgagagagaaagagattaagagcgaagaagaaggcagaaaaggtatattggagataatcgaaaacttatggaaggagctcaatggtgaattggtttatagagaggaaatgccattggcaataatcaaaaccgcattcaatatggcacgtgcaagtcaggtagtctaccagcatgaggaggatacttatttctcaagtgttgataattatgttaaagctttgttcttcactccatgtttc

SEQ ID NO: 967 - DNA, 1578 bp, Olea europaea
atggcggaaaatggcgcaatgtacaattatatcagacagcctgttattgttactccagaagttgacgatggtacgaaacacagtgaactagtggaaagaaccagacgtgaacttcagagatctaccaaaccggtggaaactttaaaactaattgataaccttcaaagattaggtatcgcctactattttgaagacgacatcaacgccatcttggatcaattctcagacggacttccggatgaagatttgtttacgacggcgctgtgttttagactgctaagagatcaaagattacaaacgggaagcgatgtatttttaaagtttatggaaaagaatatgaaatttaaggaacatcttgctcaggatactatcggcctcgtttctctgtacgaagcaagttcaatgggtgcaaacggagaagaaattttgtctgaagcaaaggagttcacagaaatgcacttaagacaaagcatgccacagttggccccacaattaaggagacaggtatcatctgctctggaattgccacgtcatttgcgtatggctaggctagaagctcggagatacatagaagaatatgggaatgaaagtgatcatgatccagctctattggaattggctagactagattacaacaaggtacagttgcagcatcagatggagttagcagaaattactagatggtggaagcaactgggtttagtcgagaaactttcatttgctagagatagacctctggaatgctttctgtggacggttggtttattgccagagcctaaatactcaagctgtagaattgagttagcgaaaactatagcaatcctactggtcatagacgatatatttgatacttacggaaaaatggaagaattggtcttatttacagaggcaattcaaaggtgggatctagatgagcttgaaactcttcccccatatatgagaatctgttatatggctctatacaataccacaaacgagatctgctataagatcttaaaagaatacgggttttgtgttctaccatatttgaaatcaacgtggatcgacatgattgaaggcttcatggtcgaggctaattggttcaatggtgggcacggtccaaacttggaagaatatattgagaacggcgtgagtactgcaggggcatatatggccctagttcatctgttttttctaatcggagagggtgtgacaaatgaaaacatagcaaagctattgagaaagccctaccccaaattgttctcggctgccggaagaatcttaaggttgtgggatgatttaggcacagctaaagaagaagaggaaaggggtgaccttgcatcatgtatgcaaatacttatgagagaaaaaaacatcgattgtgaaaacgaaggcagaaactacatattgaaggcaatcaacggtttatggaaggaccttaacgacgaacttatatctcctaatgcgatgccattagctataacaaaggttgcccttaatatggcaagagcctttgaggtcgtttacaaacacgaggaggattcctacttttcctctgttgataattacgttcaggctttatttttcacacctatcaat

SEQ ID NO: 968 - DNA, 1512 bp, Valeriana officinalis
atgataatggagttggttgaggctacaagacgtacattaagaaatgaatcctctgacagtactgaaaaaatgagactaattgactcactacaaaggctaggtctaaatcatcactttgaacaagatataaaagaaatgttgcaagattttgccaacgaacacaagaataccaaccaagatctttttactaccagtctgagatttagactgcttaggcataatggtttcaacgtcaccccagacgtgtttaataaatttaccgaagaaaatggtaagtttaaagaaagtttaggagaagacacaataggcattttgtcactgtatgaggctagctacttaggtggtaagggcgaagagatcttaagtgaagctatgaaattctctgaatctaagctaagggaaagctctgggcacgtcgcaccccatatcagaagacaaatttttcaaagcctagaactaccgcgacacttgcgtatggcccgccttgaatctaggcgctatatagaagaagactatagcaatgaaatcggggctgactcttcccttttggaacttgcaaagctggacttcaatagcgttcaagcgttacaccaaatggaactcacagaaatcagtagatggtggaagcaactgggtctgtccgataagctgccttttgcaagagacagaccgcttgaatgctttctatggaccgtcggcctgttacccgaaccaaaatacagcggttgcaggatcgaattggccaaaacgattgcggtgttactagtcatcgacgacatcttcgatacttatggttcctacgaccagttaatcctatttaccaacgcaatccgtagatgggatcttgacgcgatggacgaattgccagaatacatgaagatatgctatatggccttatataatacaacgaacgaaatctgctacaaagttcttaaggagaatggctggtctgttctaccataccttaaaagaacctggatcgacatggtagagggttttatgctggaggctaagtggctaaactctggtgaacaaccgaacctggaagcctacatcgaaaatggtgtaacgacagccggttcatatatggctttagtccacttattttttttaatcggtgatggtgttaatgacgagaatgtcaagttacttctagatccctacccgaagttattttcttcggccggtcgtattttgcgtttgtgggacgacctaggaacagctaaggaggaacaagaaagaggagatgtgtcttctagtatacaattgtatatgaaggaaaagaacgtacgttctgaaagtgagggaagacaaggtattgttgaaatcatatataatttatggaaagatatgaatggtgaattgattggttcaaatgctttacctcaagctattattgaaacaagttttaatatggcaagaacttctcaggttgtctatcaacacgaagacgatacatatttttcttccgtcgataactacgtacagagcctatttttcacgccagtgtca

SEQ ID NO: 969 - DNA, 1512 bp, Valeriana officinalis
atgattatggaattggtggaagcaacaaggagaacgcttcgaaacgaatcttcagattctacggagaagatgagattaatagattcgttacaacgtttggggttaaaccaccattttgaacaagacatcaaggaaatgttacaagacttcgctaacgaacataaaaacactaatcaggacttatttacgacttcactgcgttttagacttctaagacataatggttttaacgtaacaccagatgtgttcaacaagttcaccgaagagaatgggaagttcaaggaatccctaggtgaggatactatcggaatcctgtctttatacgaggcatcatatcttggtggaaaaggtgaagaaatactttcagaggccatgaaattctctgaatcaaaacttcgtgagtcttctggtcatgtagcgccacatattagaagacagatatttcaatcattggagctgccccgccatttgaggatggctagattggagtcaagaaggtacatcgaagaagattactcgaatgaaattggtgctgactcatcgttattggagttggccaagctggattttaatagcgtacaggccttacaccaaatggagcttacggaaatttcaaggtggtggaaacaattgggattatcggataagttaccattcgcaagagacagaccacttgaatgttttttgtggactgttggtctcttaccagaaccaaaatactcgggatgtaggatcgaacttgcaaagactattgctgtgttactagtcattgatgacatatttgatacatacggatcttatgatcagcttattttgtttacaaatgctatcaggaggtgggatttagatgctatggatgagctaccggaatacatgaagatttgttatatggctctctataatacaacaaatgaaatttgttataaagtcttgaaagaaaacggttggtccgttctgccttacttgaagcggacgtggatcgatatggttgagggttttatgctagaagccaaatggttgaacagtggagaacaacctaacttagaagcctatatcgaaaatggggttacgacagccggtagctatatggctcttgttcatttattcttccttatcggcgatggtgttaatgacgaaaatgtcaagttattgctggatccatacccaaaattattctcttcagcaggaaggattctgagattatgggatgacttaggcactgccaaagaagaacaggaacgaggtgatgttagttcttctatacaactatatatgaaggagaagaacgtgagaagtgaaagcgaaggcagacaaggtatagttgaaataatttataatctttggaaagacatgaacggtgagctgataggtagcaacgctctaccccaggctattattgagacgtcttttaacatggctagaacctcacaggttgtttaccagcatgaagacgacacatacttttcatcggttgataattatgtacaatcattgtttttcacccctgtatcg

SEQ ID NO: 970 - DNA, 1521 bp, Valeriana officinalis
atgatcatggaattggttgaagctactagacgtacattaagaaacgaatcttctgattcgacggaaaagatgagattaatcgattctttacaaagacttggtctcaatcatcattttgaacaagatataaaagaaatgttgcaagacttcgctaacgagcacaaaaacacaaaccaggacctattcactacctctttaagatttagactgctaagacataacggcttcaatgtgacgcccgacgtgtttaacaagtttaccgaagaaaatggtaagtttaaagaatcattgggggaggacacgataggtattttgtcgctgtacgaagcatcctatctaggcggtaaaggtgaagaaattctgagtgaagctatgaaattctcggaaagtaaattgagagaatcaagcggtcatgtggcgccccatattcgcaggcaaatcttccagtctttagagttacctcgacatttgcgtatggcaaggttagaatccaggagatatattgaagaagactactccaatgagattggcgccgactcatcgctgttggaattagcaaagttggacttcaattcagtgcaagcactacaccaaatggaattaacagagatctctagatggtggaaacaattgggcttgagtgataaattgcctttcgctagggataggccgttggagtgctttctatggacagttggtttgttgcccgaacctaaatattcgggttgccggattgagctagcaaaaacaatagctgttctactggtcatcgatgacatttttgatacttatggaagttacgaccagctaatactctttaccaacgctatcaggaggtgggatctagacgcaatggatgaattacctgagtatatgaaaatctgctatatggcattatataacacgactaacgaaatttgttataaggttcttaaggagaatggttggagcgttttgccttatcttgagagaacttggatagacatggtggaaggtttcatgttagaagcaaaatggcttaattctggtgagcaaccaaatttggaggcatacattgaaaatggagtaactacagccggctcgtacatggccttggtgcacttattttttcttattggtgacggtgtaaatgatgaaaatgttaagttgttgttagatccttatcctaagctattctcatcagctggaagaattctaagattgtgggatgacttgggaacagcaaaagaggaacaagaaagaggtgacgtgtcttctagcatacagctttatatgaaggagaagaatgtacgttcagaatcggaaggcagagaaggcatagtggaaatcatctataatttgtggaaggatatgaatggtgagctcataggatcgaatgcattgccacaagcaattatagaaacaagcttcaacatggcccgaacaagtcaggttgtttaccaacatgaagatgatacatacttttcatctgttgacaactacgtccagtcactgttctttacacccgtttctgtaagcgtt

SEQ ID NO: 971 - DNA, 1617 bp, Pogostemon cablin
atgatgtctacgtcgtctcttccggttggcaacgaagctctgcttaagtacataagacagcccgttgttttaccaaccgaggaggatgaatctataaagcggagagattatttgttggaaaagactgccaggcgtttaaggacgagcaccggatccgtagagaagttgaaattgattgatactatccaaagactaggtattgattattatttggaagatgatattaacgttgttttgcgcaacgaatactataacggtagatcttcagaagaggatttgtttaccaccgctttgagatttaggttactgagacataatgggtttcaaatctcctctgacgtgtttatgaaatttaaggacaaaaacggtaagttcaagaaatggattgcagaagacacaattggtctcttgtccctgtacgaggctagctatatgggtgctcatggcgaaaaaatactagaagaggccatggagttttctagaagtttattgaaaagatctttgccacaattgccacccaaactgcatggacaagtggctcaagcgttagaattgcctagacatttacgtatggcaagattggaagcaaggcgatttgtccaacaatatgcaaagcaatctgattgtgatagggatctgttaaacttagctaccttggattataacaaggttcaattacaacatcaatttgagctcgcggagattacaaggtggtggcaacaattgggcttggtcgaaaagctaacatttgctcgtgatcgtcctttggaatgtttcctttggacagttggcttgcttcccgaacctaggtattcaacttgtaggatcgaaatggccaagacaatcgctatacttttggttatagatgatatttttgacacatacggtaaaatggacgaactgttactatttactcaggcaatccggcggtgggacctagaagcaatggacattttacccgaatacatgaaaatttgttatatggccttatacaatactacaaatgaaatttgttacaaggtattaaagttgaacggttggtcagtcttaagttacctaaaaagtacttggattgatatgattgaaggatttatggttgaagccaagtggttaaatggaggaggggcccccaacctggaggaatacctcgagaatggcgtgtctacagccggcgcatatatggctttagtacacctcttttttctaataggggagggagtcaatgatcaaaatgcccccctcttgacaaaaaaaccataccctaaactatttagtgcagctggcagaatactgaggctatgggacgatttgggtacagctaaggaggaacaagaacgcggagacgtcgcatcgtcaattgaattcgtgatgagggaaaaagaggttgagtcggaagaggaaggacgcaggtacattcttggcgaaatttacgagctgtggaaggatctaaacggtgaacttatgtccaaaaatggtatgcccctagcaattattaaagttgcgttaaatatggcaagagcatcccaagtagtatataaacatgaggaagacacatacttttcgtccgttgataactatgtggaggctttattttttactcccctacctagctcaatt

SEQ ID NO: 972 - DNA, 1629 bp, Picrorhiza kurrooa
atgtctagtgcagcacccaatgttactcaagtcgtcgtcggcgctaatgatgcattgttgcaatatacacatcaaccaatgttgataccctctgaggtcgacgcagatactgaaagaagagattatttacttgaaaaagcgcgtcaagaattgtcaagaactactaagccaactgataagttgaaattgattgatatgattcaacgactcggtattggattttacttggaagacgatataaatgcaattttgaggacccaattctcagtaaatgttattgacgaagaagacttgtctgctactggtcttcgttttagaatgttaagacagaattcgtttcccatttccagtgatatatttaaacgattccaagatcagaatgagaaatttgatgaaaccctcacaaatgatactttgggagtgattgaattggtaagaagtatcattcacggtgaaccgaagggggaagaaatattagaggaagctatggaattctctaagactcgtctgaaaaggtctttgtcctctttacctgcacaaataaaggcagacgtcggccaggctttggagctgccaactcatttacgtatggcaagactcgaggctagaaggttcatagaacagtacgcaactcagtcagaccataatccaattttattagaattagcaactcttgactataatcacgtacagtcacaacatcaaatggaattggtggaaattactcgctggtggaagcagcttggtctagtagatcaattgtcgttcgctcgtgacaggccactagaatgctttctatggacagttggattattgccagaacctaagtatagctcctgtagaattgaactagccaaaaccatcgccgttcttttagttattgatgatatattcgatacttatggcaagatggatgacttaattctatttacagatgcaattcaacgttgggacctaggtgctatggaatcattgcctgagtatatgaaaatctgttatatggcgttatataatttgactaacgaaatatgttataaagtcctgaaagaaaacggttggactgtattaccctacttgaaatcttcttggattgatatgattgaaggtttcatggtggaagcgaaatggtttaatggtggttgcgctccaaatttggaagaatacgttgagaatggtgtttcgacagcaggatcttacatggctttagtacatttattctttttaattggagaaggtgttactgaacaaaacgcacaactgctaatgaaaaaaccatatccaaaagctttctcatctgcaggtcgaatattaagactgtgggatgatttgggtacagcgaaagaagagcaagaaagaggagacctagccagttcgattaacttgtttatgaaagaaagaaacctcgcgacagaagaagaaggaagagagtgcatattagaagatatctatggttattggaaggacctaaacggagaattagtgtcccagaaagaaatgcctctagcaatcattaaagttgctttaaatatggcaagagcatctcaagttgtttataagcatgaggaggatagctactttagtaatgtagataattacgtgcaggcattgttattcacccctttaattatc

SEQ ID NO: 973 - DNA, 1635 bp, Gentiana rigescens
atgtgtatgcccatccctacaagtactatgtcacaacctattgctacccctctaataaaggataatgaatcgctattgagatatttacggcaaccaatggtgttacctcacgaactagatgatgatacaaagagaagggaacttgtagaaagaactagacgcgagttacagtccatgagtaagcccttggaggctatgaaattaattgacactttggataggttagggatcgcctatcattttgaagatgatattaatcaatctctaacaaggtttagctctggtcaaccaaatgaagatttgttgactacatctttaagattcagattattacggcataacggtcattccatctcatctgaaatctttggtaagttcttagttcaaaatggaaaattcgaggaaagtttaggcgaggaggatatattaggactcttgtccttatatgaggcttcctatatgggtggtggcgaagaaaagatattgatggaagctatggaattttctgaagctcacttaaagtcaagcattgcaaagttaacacctcaattgtcgcgtcaagttgcacagagccttgaattacctagacacagaaggatggctcgattggaagcaaggcgctacatagaagaatacggtaagttcgagaacaattataatcctgacttattggaattagcaaagctggactacaataaggttcaaagtctgcatcaaatggaactatccgagatcactagatggtggaagcaactgggacttgtcgacaagttgccattcgctagagacaggccattagagtgtttcttgtggactgttggtctgatgccagaaccgaaatattcgggttgcagaatagagttagctaagactattgctattttactcgttatagatgacatttttgatacccacggtactatcgatgaactggtgctatttacaaatgctataagacgatgggatttgcaggcaatcgaagagttgccagagtacatgcgtatttgctatatggctctttataataccactaatgaaatttcatataaaatccttaaagaaaatggatggagtgtaaggccctatttgaaagaaacatggatcgacatggttgatggtttcatgatggaagcttcttggttcacaaacggacaggttcccaaaatggaagaatatcttgaaaacggtgttacaacagcgggatcttacatggcattagtacactgtttctttctgatcggtaagggtgtttctgaagaatctgtcaaacttttaatgaacccttacccaaaattgttttctaatgccggtcgaattttgcgtctttgggatgacttaggaacagctaaagaggaacaggaaaggggagatcttgcttcgtctattgttctatttatgaaagaaaagaatattacgtctgatgaagaggccagagaatcgatcttgaagttgatacacaatctgtggaaagaaatgaacggagaattagtctcaagaaatgctctgcccttagaaataaaaaaagttgcattcaacatggcacgtgcgtcacaagtggtgtatcaacatgaagaagactcttactttagctctgtcgacaattacgttaaagcattgttttttactcctttgata

SEQ ID NO: 974 - DNA, 1623 bp, Camptotheca acuminata
atgtgtacaacgcttccgagtccggcaaccagcactgcaacaatcggtgatacagattctttgttgaagtcacaaaggcaatttactgtgtatttaccggctcatgaagctgacaaagatagaaaaattgaagaaatcatggaaaaaacccaaggggagctggaaaaaacaagtgatccgacaagcgttatgaaatttattgatacgcttgaacgattaggaattgcttatcactttgaagaagaaataaattccttgttgcaaggttttttagcaaatggttattcccattacccacaagatttgtttaccactgcacttaggtttaggctactcagacacaacggatatcatatatcagccgatgtttttcaaaagttcgttgataagaatgggaaattcaaagaatcattacgcgaggatactcaaggtatgttgtctttatacgaagcctcctatctgggagctaacggcgaagatattctatctcaagccatggaattcacagaaacgcatttcaaacaatcaattcctctaatggccgctgttccacaattagagcaggccttggaacttcccagacacctaaggatggcaagattagaagctaggcgttttattgaagaatatattagggaatccgatcactcctcagcactactggaattggctaaattggattataacaaggtgcagttgctgcatcaaagcgaactcaatgaaatatctagatggtggaaacaactgggtttggtggaaaacttaggatttggtcgcgacaggccgctcgaatgctttctgtggactgtaggtatcttgcctgaaccaaagtactctggatgtagaatcgaattaacaaaaaccatagccgtcctgttggttttggatgatatttttgacagctttggtacccttgatgagttggtccgttttacacatgcaattagaagatgggatttgtctgcaatggaacagctcccggaatacatgaaagtgtgctacatggctttatataacacaactaacgaaatcggctataaaattttaaaagaacatggttggaacgttgtaccatatctcaagagaacatggattgacatgatcgaaggctttcaagctgaagctaactggtgttcttctgggtacgttcctagtctagaagaatatatagaaaatggcgtgacaacggcaggctcatacatggcattagtccatttgttttttctcatgggccagggtgtaacggacgaaactatcgggatgctagaaccataccctaaatttttcagctccagtggaagaattttaaggctttgggatgacttgggtactgcttctgaagagcaagaaagaggtgatattgcatcttctattgagctatttatgagagagaaggacttatcatcacagggtgaagctagaaagtatgtaaagcaagttatttattcactatggaaagaattgaatggggaacttatggcgtcaaaggcgatgcccttgcccttgattaaggcggcatttaacatggccagaacgtcgcaagtgatatatcaacatggggacgataattcttttcctagtgttgatcaatgcgttcagagtctattctttactcccattctt

SEQ ID NO: 975 - DNA, 1605 bp, Osmanthus fragrans
atgtctccaagcgttactcctctaatacccacagaaaacgacgcattatataattacatacgccaaccagttattgttacgcctgaggtggatgaggggaccaagcatagagagctgcttgaaaagacacgaagagaattgcagaggtctacaaaacccgtcgaaacccttaaattgattgataaattgcagagattaggtattgcttattactttgaggatgatattaatgcgattctggaccgtttctccgattgtctacctaatgaagatttgtttacaaccgctctgtgttttcgtcttctgcgggataatggatacaaaacagactcagatgtgtttttaaaatttatggaaaagaataaaaaattcaaaggccacttagctcaagatacaattggtctgttgtctctttatgaggcctcatatatgggagccaacggtgaagaaattttgtcagaagctaaggagtttacagagattcaccttcgtcaatcaatgcctcgccttgctccacaattgcgtaggcaggtgggttctgctttggaactaccaaggcatcttaggatggcccgtttagaagctcgcagatacattgaggaatatgccaccgagtcagaacacgatccagcgctcctagaacttgccagattagattataataaggtccaactacaacaccaaatggaatccacagaaatatctagatggtggaaacagctgggtcttgtggaaaaattgtcttttgccagagaccgctttttggagtgctttttgtggactgtagggctgcttcctgaacctaaatactcttcatgcagaattgaactggcaaagaccattgctattttgttggtaattgatgacatatttgatacatatggtaaaatggaagaactagttttgtttacggaagcaattcaacggtgggatttggatgagctagaaaccttaccaccctatatgagaatctgttacatggctttgtataataccacaaatgaaatctgctacaagattcttaaagcatacgggttctgtgtcctaccttacctaaaatcaacctggattgatatgatcgaaggctatatggtggaagcaaactggtttaatggaggacacggaccaaatttagaagaatatatagagaacggcgtcagtacggtgggtgcctatatggcacttgtacatttgttttttctgatcggtgaaggtgtgactaacgaaaatataacaaaactattaaggaaaccgtaccctaaattgttttctacggctggacgtatcttacggttgtgggatgatttaggtaccgcaaaagaggaagaggaacgtggggacttggcgtcgtgtatgcaaattttgatgcgcgaaaaaaacatttattgtgaaaacgaaggtaggaagtacattcttaaagctataaattctctttggaaggatttaaatgatgaattgatctctccaaacgcgatgcctttagcaataacaaaggtagcccttaacatggcaagggcgagcgaggtagcctacaaacatgaagaagattcatatttctcttcggtatacaactacgtgcaagcactattttttacccctatcaat

SEQ ID NO: 976 - DNA, 1521 bp, synthetic construct
atgattatggaattagtcgaagcgaccaggaggactcttagaaatgaatcctcggattccacagaaaagatgagattaatagattctcttcagaggctaggtttgaaccatcatttcgagcaagacattaaagaaatgttgcaagatttcgctaatgaacacaaaaacacaaatcaggatctgttcacgacaagtttaagatttagattgttacggcataatggtttcaatgtgactcccgacgtttttaacaaattcaccgaagaaaatggtaaatttaaggagtctttaggcgaagacactatcggtattctgtcgctgtacgaagcttcctatctcgggggtaagggggaagagattttaagcgaagctatgaaatttagcgagagtaagctaagagagtcttctggccatgttgctccacatattcgcagacaaatttttcagagccttgagctacctagacatttgagaatggctagattggagagccggcgttatatagaagaagattacagcaatgaaatcggagctgattcaagcctcttggagctagcaaaattagatttcaattctgttcaagctcttcatcaaatggaacttaccgaaatcagtagatggtggaaacaattaggcctatcggataagttgccattcgctagggatagacctttggaatgcttcctgtggaccgtcggactattaccagaacccaaatactcaggttgtagaatagagttagccaagacgatcgccgtgttactcgttatcgatgacatcttcgatacttatggttcctatgatcagttgatcttgttcactaacgccataaggcgttgggacctagatgcaatggacgagcttcctgagtatatgaaaatttgttatatggccttatataacacaacaaatgaaatctgttataaagttttaaaagagaatggatggtctgtattgccctaccttgaaaggacgtggattgatatggtcgagggttttatgctagaagctaagtggttgaattctggcgagcaacccaaccttgaagcttatatagagaatggagtaactactgctggatcgtatatggcattagtgcatttattctttctcataggcgatggagttaacgatgagaatgtaaagctgttgttagacccttatcctaaattattcagttccgccggacgcatattaaggttgtgggacgatttaggtactgcaaaagaggagcaggaaaggggtgacgtatcatctagtattcaactttatatgaaagagaagaatgtgaggtcagaatcagaaggaagggaaggcatagtcgaaataatttataatctatggaaggacatgaacggtgaactaattggatcgaacgctttgccacaagctattattgagactagttttaatatggctaggacctcacaagttgtctaccaacatgaagacgatacttactttagttcagttgataattacgtccaaagtttgttcttcactccggtttctgtgtcagta

SEQ ID NO: 977 - DNA, 1575 bp, Phaseolus lunatus
atgacacagaaggttccatctcgtacaaaccctatgatgacatctttggaacagatcaaaattagaattcaggaagtcctacttaagtcaaatgactctctagagactcttaagttgattgacaatatccaacgcctgggcatcgagcatcacttcgaagaagaaattaacttgcaactaggaaaggtaggtaattgtaataactcccaagatttatctgcggctgctctacagttcagactactaagacataatggttggtctaccagtagcgatgtcttcaataactttttggacaaatctggtaattttaaagaatcattcaatagagatatttggggtatgttgtctctatatgaagcatcttactttggagcacaaggagaagaggttttgcaacacgcaatggaattttctagggcccacttacatctgtcactacctttgttatcacctgaagttggtcgggttattgttgaagctttgaagttgcctagacatcaaagaatgtcacgtttggaagcaaaaaattacatggtccagtattcaactgaatcgtcacaaataccagcattattagaatttgctcgcatagagtacgataccgtgcaaagtatgcatcagtctgaattggctgaaatatccagatggtggaagaatttgggacttatcgaaaggttaggcttcgggagagatggtcccagagaatgctttttatggatgttgggtgtatttccagaaccgtgttattcccactgtaggatcgaactggccaaagcaatctgtattctacaggttctggacgatatgttcgacacatatggaacgcttgatgagctaatcttattcacagaagctgttcaaaggtgggacttggatgctatggaaaaattacctgagtatatgaagatatgttacatggccctgtacaataccacacatgaaatagcctatcgtattcaaaaagatcacggtcagactgtggtggcttgcttaaaaaggacgtggatcgacctattggaagcttacttaattgaagctaagtggtttaacaacaaatatgtaccaactttcggtgaatatttagataatggtgttatatcatctggctcttgtctagcgcttgttcatgcaacttttctaattggtgataacctctcaaaggaaacgattagcatgatgtccccttaccctagactattcagttgttcgggagagatactaagattatgggatgatttaggcacaagtaaagaggaacagaagagaggtgataacgcttgttctatacagtgcctaatgaaagaaaattatattctcgatgaaacttttgcaagaaaacatatcaaacaagtactaggcaacttatggcctgaattgaatgggttagtaatggccactactacacttcctttttctattagaaaggcgtctttaaacatggctcggacgagtcaattcatttatcaacatggtgatgatcagactatgcctaccgtgaacgatttagtaaaggagttgctttttacaccttctagtaagagcggcgaagagtcggacacgtattgcgtggta

SEQ ID NO: 978 - DNA, 1587 bp, Unknown
  geraniol synthase
atgatatccactatcagtcaaccaactaggaaagaacccgcaacgaccaaaccagagattatggaggaattgcatgaaggaacacgaaaggagctacttactagctccagccctatagctactatgaagttgattgacagtatccaaaggctaggtgtaggatactattttgaagaagaaattaatacccttttagataggtttttggacttggaaactactgaggatttactagcgactgcactaagatttagattacttcgtgataactgtttcccagctcatagcgatgtttttggaaaatttatgaataaggatgggaagtttaaggaatcgcttagaaaggatgtatggggtttgttatctctgtacgaagctagctatttggggacgaaggatgaagttgaattggttgaagctatggaattcacaaagacgtgcttggaagaacagagtattccactcatggctcataagctttcaagacatgttagtcaagccttagatcttcccagacacttgaggatgcccaggttagaggctaggaactatatccatgagtactctttggaatcgaataacagtccgccgttgctggaactagccaagcttgagttcaatgctgtacaatctctgcatcagaaagagttaattgaaattgtgagatggtggaaacagctaggtttagtagacaagttaggcttcgctagagaccgacctctggaatgttatttatggacagttggtattttcccggagccatacaattccacatgcagaattgaattgacaaaaacgatagcaatcttactagtaattgatgacatcttcgatacgtacggctcacttccagatttgatattgtttacagaggccgttagacgatgggatctgaatgctatggagtcgttgccggaatacatgaagatatgttatatggctttatacaatactactaacgacattggtttcatgattttgaagcggcatggattatcaattgtcccacacttgaaaagaacttggattgacatgtttgaagcttttcttacagaggcaaagtggtttaattctgggtacgtaccaacgttagaagaatacctggacaacggcgttaccacaggtggtacgtatatggctttagttcacagttttttcttaatgggtcagggtgtgaacaaagaaacagtcacaatgatggaaccctaccctgatttatttagccttagtggtagaattctgagattatgggatgacctaggcacggcacgtgaggagcaggaaagaggcgatgttgcatgttcaatagaatgcctgatgagagagaaaagaataagttgcgacgatgaaggcaggaaacaagttagacaactgattagatcattatggaccgaattgaatggtgaattaatagcgccttctgccatgccgttgtcgattattaatgcttcattgaatttagcaagaactgctcaggtcgtttatcaacatggcgacgacaagaagggaagtagtgttgacaaccaggtccaagcactaatctatattcctatctcttttccaaaacgacgtgatttgaagttactg

SEQ ID NO: 979 - DNA, 1539 bp, Vigna angularis
atggctatgaaacaaaataaattatccattaagtcagtggctttcagggacaaagtaccaattcagatcgatcccggtaaaaaaaaactagagcaagttaagaggagttctcaagagaccttgctaaattccagcgaccccacaaagactttgaaaattattgataatattcaaagattaggtatcggccatcatttcgaagaagaaattaacgtcaaattaggaaaagtggctgactgcgattttagccaagatttgtgctcaactgccctacaatttagattattgcgtcataacggttgccacgccagtagtgatgtgttcaagaagttcctggaccattccggtaattttaaggaatcgatcacaacagatatatggggtatgctatctatgtatgaagcatcctatctcggtgcaaaaggagaagaagttctacaacaagcgatggattttagctctgctcacctacaacagtctttacctttattgtcgccggacgtaggcaaccatgttgtaagggctctgacactgcctagacatcttagaatgtcaagattagaagcaaggaattacattgaagaatactcccaagtctcttctaagatgccatacttgctagagatggcgaaaatcgataacgcaatggtccagtcaatgcaccagaaagagttggccgatatctcgaggtggtggaaggacctcggattagtcgaaagattgggttttgctagggacaaacccgccgagtgctttctttggacggtgggtgtttttccggaaccttgctattctaattgtcgaattgaactagccaagacgatctgcatactattagttatggacgatatttttgatacgtacggaacctcggatgagttggttctatttactgaagctataaagagatgggacttagatgccatggaacagttgcctgaatatatgaagatttcatatctggctttgtacaacacaattcaggagattgcttgccgaatccaaatggagcacggccaaactgtcttatcctgccttaaacggacgtggatcgacattttcgaagcttttctgaaagaagctaaatggttttcgaataagtatgttcctacttttgaagaatacttagcaaatggcgtaatatcttcgggttcttatatggcattagttcatgccacttttctgataggagatggtatatcgaaagaaactatctctttgatgaatccttatcctcgactattttcctgctccggggaaatcctgagactatgggatgacctggggactagcagagaagaacaggaaagaggcgataacgcatgcagtctacaatgcttaatgactgaaaataacataagcgacgaaattgtcgctagaaagcagattagaggttttatcagaaatttatggcctgagttgaactccttggctctaacaactgcttcattacccttttccgtaataaaagcttcattgaatatggccagaacctcccaggtaatatatcaaaatggtgacgatcaaaacacttttact

SEQ ID NO: 980 - DNA, 1398 bp, Vitis vinifera
atgtctgaagcggattcaagtacccggagaatgaaagaagttaaggaacgtacttgggaagctttctatagagcttgggactcccgtgctgctatggaaatggtggacacagtggaaaggttggggttaagctatcattttgaagatgaaataaacgctttattacaacgcttttgcgattggaacgcttccgaagatctgttcacgactgcattgcgcttcagattgttaaggcagaacggtttccctacacactccgcttctgatgtgtttggtaagtttatggataagaacggtaagttcaaagaatctttaacagaagatatctgggggatgttatctctacacgaagctagccatctgggtgccaaaaacgaagaagtcttagccgaagcgaaggaatttacacgtatccacctcattcagagtatgccgcacatggaaccacacttctcatctcatgttggaagagctttggaactaccaagacatctaagaatggcgcgttggtggaaacagttgggtctagttgataaactagacttcgctagggatagaccaatggagtgtttcttgtggactgtgggtatttttcccgatcctcgtcatagttcatgcagaatcgagctgaccaaggcgatagcaatattattggttatagatgacatctatgattcctacggttccttagacgaattagccttattcactgacgctctgccagagtacatgaaaatttgttacatggcactatataacactacaaacgatattgcttatagaattttgaaagaacatggttggtccgtcatagaagatttgaagagaacgtggatggacatttttggtgcatttttagccgaagcttactgtttcaagggcggtcatgttccctcccttgaggaatacttaacaaatgcagtaacaactggcggcacatacatggctctagttcatgctttctttttaatgggtcaaggtgttacaagagagaatatggcaatgcttaaaccctatccaaacatattttcctgtagcggtaaaatacttagactatgggacgacttaggtactgccagagtaggtgataacgctagctcaattgaatgctataaaagagaaagagaaagagagatggataccgtcttggaagatgaagcctgtcgtaagcatataagacaaatgatccaatctctatgggtggagctgaatggcgaattggttgcttcttcggcccttcctctgagtattatcaaagctgcctttaatctgtccaggaccgcacaggttatctaccaacatggtgacgacaacaagacaagttcggttgaagaccatgttcaagcattattgtttcggccagtttcgtcaaacggtcatgcgcagattactatgcat

SEQ ID NO: 981 - DNA, 1611 bp, Coffea arabica
atgtgtatgccaactcctacggcaacccaacctattgctacaccattaatacgcgacaatgagtctttgttgaaatacctcagacaaccttccgtacttccacatgaggtcgatgattctcgcaaggaattgttgggtagaactcgaagacaattaagaagcacctctgagcctctaaaagccatgaacttaatagatacgttgcaaagattgggtttagcataccatttcgaagacgatatgaatgctattttgtcacaattgagttcctcgggtcaatcagatggtgatttactcacaacagctttaaggttcaggttgttgcgccataatggacacaagattgttcaaaagtttatggataaaaatggaaagtttaaagattcgctaaaagaagacactatgggcttactttctttatatgaggctagtcatttagctgccaacggcgaagacatacttcttgaagctatggagctaacagaggctcatttaaaacaatctttaccctcattacctacccagttggcaaggaaggtctcatccgccttggagttaccacgccacagacgtatggcccgcctggaagcccgcaggtacatccaagagtacagtgaggagattggacacgaccctaatttgcttgaattggccaaattagattataacaaggtccaatccttacaccaaatggaattgacagagatttccaggtggtggaagcaattggggctagttgataaacttacctttgcaagggatagacccctcgagtgttttttatggacagtaggtatcctgcccgaaccaaagtattctaattgtaggattgaattagcaaagacaatcgcaatattattggtcattgacgacatttttgacactcatggtactatagatgaattggtcctttttacaaacgcaattaggagatgggatttagaagctatggaaggactccccgagtatatgagaatttgctacatggcattatacaataccacaaacgaaatttgttataagattcttaaagaaaacggatggtctgtccttccctatctcaaagcaacgtggatcgatatgatcgaaggttttatgctagaagcatcctggtacaataatggtcaggtgcctaacatggaagaatatgtagaaaatggtgttacaactgctggtgcatatatggcaatggtccatttattcttcctgattgggcaaggtgtgactgaagagaacgtcaaattgcttatgaagccatatccaaaactattttcatgttccggcaggatccttagattatgggatgatctcggtactgcgaaagaggagcaagaacgcggagacctggcctccagtatccaattgttcatgagggaaaataatattacttgtgacgaagaaggcagaaagagaattttgcaattaatcgataatctctggaaagatttaaactgggaactggtgtcaagagatgcaatgccattggccataattaaggccgcatttaacatggcaaggagctctcaggtagtttatcagcatgaagaagaatcctatttcagttcagtcgataattacgtggaaagtctgttctttactccaatcataaat

SEQ ID NO: 982 - DNA, 1623 bp, Coffea canephora
atgtgtatgcctacgcctaccgctacccaaccgatagcgacgccgttaatacgtgataatgagtcgctcttgaaatatttaagacagccttctgtgttgccccacgaagtagatgatgggaggaaagagctgttaggaaggactaggagagaacttcgaagtacttcagaacctttaaaagccatgaacctaatcgacactttacaaagattaggtcttgcgtatcacttcgaagacgatatgaacgctatactttcccaactatcatcgagtggtcagtcggacggtgatctattgacaactgcattaaggtttcgactcttaagacataacggtcataagatttcttccgacatattccaaaagttcatggataagaatggtaagtttaaggactcgctaaaggaagataccatgggcttattatcactttatgaagcatcacatgtaggtgcaaatggtgacgatttattattagaggctatggaattcacggaagctcacctaaagcaaagcctgccttcattaccaactcaattagctaggaaggtctcttcagcattggagctgcctcgtcacagaaggatggcgcgcctagaggcacgaagatacattcaagagtattcagaagaaatcggtcatgatcccaacctacttgaactcgcaaaacttgattacaataaagtacaaagccttcatcaaatggagctaactgaaatttcaagatggtggaaacagttaggtctagtagataaattgacttttgcaagagacaggccactggagtgttttttgtggactgttggaattcttcctgaaccaaagtattcaaactgtcgaatagagctagctaagactatagcaatcctcttagtaatcgatgatatattcgatactcatggaacaatcgatgaattggtcctttttacaaacgctatcagaagatgggacttggaagccatggaaggtttgccagaatatatgagaatctgctatatggccctttataatactactaacgagatttgttataagatcctaaaagagaatgggtggtcagtgttgccttatctaaaggccacctggatcgacatgattgaaggttttatgttagaagcttcttggtacaataatggtcaagttcccaatatggaagaatacgttgaaaatggagtgactaccgcaggtgcatacatggctatggtccatttgttcttcttgattggtcagggtgttactgaagaaaatgttaagctactaatgaagccataccctaaactattctcttgttctggtaggatccttagattgtgggatgatctcggtacagcaaaggaggaacaggagcgtggagatctagccagcagcatacagctgtttatgcgtgaaaataatattacctgcgacgaagaaggacgcaagagaatactacagctaatcgataacttatggaaagacctcaattgggaattggtatcgagagacgctatgcccttagcaattattaaagcagcttttaatatggctagaagttctcaagtggtatatcagcatgaagaagaatcgtatttctcatctgtggataattatgttgagtcccttttcttcacacctataataaac

SEQ ID NO: 983 - DNA, 1587 bp, Glycine soja
atggcgttttcagaaaaggttccgagtcaaacatactatcccgggatgaaggatttcgatcaagtcaagcgtaaaagtcaagaggcactcttgaactcatcagatagtttgcgaacattagaaatcattgatacaatacagagacttggaatcgaacatcattttgagaaagaaatcaacttacaacttggcagaataggcgactggaatgctgccgaggatttattcgctacgtctcttcagttcagattattaaggcactatggttggcccacttgttctgacgttttcaataaatttcttgatcaatcaggtaactttaaagaatccgtaactcgtgatatttggggtatgctctccttatatgaagcatcctatctaggtgccaagggtgaagaggttctccaacaggcgatggattatagtagagcccatttatgccaatcattgagtgatctttctcctaaggtcggttctattgtggtcgaagcattgaagctgcctaggcatcttcgcatgggtagattagaagctaagaacttcatggtcgaatactcacaagcttcaaatcaaatccctgccttgcttgaattggcacggttggattatgatatgattcaatccatgcatcaaaaagagcttgcagaaatttctaggtggtggaaagaacttggcctgattgaacggttaggtttcggcagggatggtccgagggaatgttttctatgggttttgggtatattccccgaaccaaggtactctaattgtcgtatcgaattggcaaaggctatttgcattttgcaggttttagatgatatgttcgacacctatggcactcttgatgagttgatattattcactaaagccataaaacgctgggacttggatgttatggaacaactgccagagtacatgaagatttgctatatggctttgtataacactacacacgaaatcgcttataaaatccaaaaggaccacgggcaaactgttgtcgcatgtttgaaaaggacatggattgatttaattgaggcttatttgaaggaggctaaatggtttaataataaatatgtgcctacgtttcaacaatacttggacaatggtgtcatttcatcgggttcgtatttggctctagttcatgcatcttttttaatcggcgatgacttttccaaggaaacaatttccatgatgaatccaccctatcctcgccttttctcatgcagcggtgaaattttacgcttgtgggacgaccttggaaccagcagagatgaacaggaaaggggagacaatgcttgttcaattcagtgtttaatgaccgaaaacaatatcagcgacgagaacgtagccagacgtcatattcgcaaactgatcaagaacttgtggccggaattaaatggtttgaccatgataacgacaactttgccactgtcagtcatgcgtgcgagtttgaatatggccaggacctcacaagtaatataccaacacggtgattatcaatcaatgttgactgttgacgatcatgttcaagcattgttgcttacgccatcaatcaattatcaagatgagagcgacattaaccacgtcatt

SEQ ID NO: 984 - DNA, 1554 bp, Glycine soja
atggctttcaacgacaacaaagttccttctcagattgatcttcgtactaacaattttgaacaagtaaaaaggaatagtcagatggccctattgaattcttctgacccaattaaaatattaaaaatgattgataccattcaaagattgggtatagaacaccattttaaagaggaaataaatgttcaacttggtaaagtcggggattgggacgtaactcaggacttgtttggtacagcactacagttcagactgcagaggcataacggttggccttcttgtagcgatgtatttaaaaaatttttagacaagagtgggacttttaaagagagcattacaaacgatatctggggtatgttatccctgtatgaagcttcatacctgggggctaaaggtgaagaagttttacagcaagccatggacttttccaaagcgcacttacatcagagtctcccccacttaagtcctgagctacgtaagttagttgctaaagctttaacattacctcgtcatctgagaatgggtagacttgaagcaagaaattacatggaaaagtactcccaagcaactaatcagattcctgctctcatggagctggccaaattggattttgctatggtgcagtcaatgcatcagaaagaattagctgaaattagtagatggtggaaaaatttgggactagtagagagattaggatttgcacgggatagacctgctgaatgtttcttatggactgttggaactttcccagaacctagatattccaactgtcgaatcgaattaacaaagactatttgtatcttattggtgatggatgacattttcgacacatacggtactttagaagaactagtcctgttcacggaagctataaaaaggtgggatttagacgctatggaacagcttccagaatatatgaaaatatgttatatggccttgtttaatactacccacgagatcgcttacaagatacaaaaagaacatggtcaaaccgttgttgcttgcttgaagcgaacttggatcgatatttttgaagcctttttaaaagaagcaaaatggttcaataatggatatatacctacttttaaagaatatttagacaacggtgtgatctcttctggatcttacatggctctagtccatgcaacgtttttaattggtgattcgttatctaaggaaacaatttcgataatgaagccttaccctcggcttttttcctgttccggcgaaatactcaggctatgggatgatttaggtacatccagagaagaacaagaaagaggggataacgcttgctctattcaatgtctaatgacagaaaataacttatctgatgagaatgtagctagaaaacatattagacagttaattcaaaatttgtggcctgaattgaacggcctggccatgacaacaaccgccctgccatctagtgtaatgaaggcttctttaaatatggctagaacggcccaagttatataccaacatggcgacgatcagaatacgttcacggttgacgattatgtcaaaactttgattttaaccccaagctcgaattac

SEQ ID NO: 985 - DNA, 1473 bp, Vigna angularis
atgacacaaactattcctacgatgacttccttggaacagcttaaaatcaaatcccaggaagtactgcttgattcatctgactcgttgagaacgttaaaattaattgacactattcagagacttggtatcgatcaccactttgaggaagagattaacctgcagttaggtagggttgctgattgcaataatgctcaagacctgttcgcaacagctttgcaattcaggttattgaggcacaatgggtggtccacaagctccgatgtgtttaataaatttttggacaaatcaggtaattttaaagaatccgtaaccggggatgtctggggcatgctgtcattgcatgaagcctcgtatttaggtgcagaaggtgaagaagtactacagcatgcgatggaatgttcgagagctcatttacaccagtcacttccccatctgtcgcccgaagttggaagagttgttgttgaagccctaaagttaccgaggcatcaacgcatggttagattggaagctaaaaactacatggtacagtattctaaagaaagttctcaaattcctgcacttctggagctagcgagattagattacgatatggttcaatccatgcaccaaaaagaactagcggagatatccagatggtggaaggacctcggattgatcgaacgccttggttttggaagggatgggcctagggaatgttttttgtgggcattaggtgtcttcccagagccacggcactccaattgtagaatagaactagctaaagctatttgcatcttacaggttattgatgacatgttcgatacatatggtacattagacgaattgatattgtttactgaagctgttcagagatgggatcttgatgccatggaaaagctgccagaatacatgaaaatttgctatatggctttatataatacgacccatgaaatcgcttacagaatacagagagatcatggtcaaacagtggttgcttcccttaagagaacatggatagacctgctggaagcctacttaaaagaagcaaagtggtttaacgataagtatgtgccagcttttgaagaatacttagacaacggcgtaatctcctccggctcctgtttagctttagtacatgcgaccgtgttaattggtgagaatttgagtcgggagaccatcagtttgatgtcaccttaccctagattgttcacatgttcgggagaaattttaagactatgggacgacttgggaacttcgaaacatatcaggagattgttgggtaacttgtggcctgaattgaacggactagccatggccacaacaacgcttccatcggccgtaaccaaagccagcttcaatatggcaagaactagtcaattcatatatcagcatggtgatgatcaacaaatgcccacagtcgatgatttagtacaagcattattgtttactccatccgacaaatatggtgaagaatccgacattaactgtgtcgta

SEQ ID NO: 986 - DNA, 1299 bp, Glycine max
atggcattcaacgataataaagtaccctctcaaatcgatctgcgtactaataattttgaacaagtaaagaggaattcacaaatggcattattaaatagttctgatcctatcaaaatactgaagatgatcgacacgatccagcgtctgggcatcgaacatcattttaaggaggaaataaacgttcaattaggtaaattgggtgactgggatgtaacacaagatttgtttgggaccgctctacaattccgtttgcaacggcataatggctggccaagttgtagcgacgtttttaaaaaatttttggacaagtcgggtaccttcaaagagagtataacgaacgacatttggggtatgctaagtttatatgaagcctcatacctcggagcaaagggtgaagaagtgctgcaacaagcaatggatttctcaaaagctcatcttcaccagagcctcccacatttatctccagagctccgaaaacttgttgcaaaggcacttacgttgcctagacatttgcgaatgggaagattagaagccagaaattatatggaaaaatatagccaagctactaaccaaattcccgccctgatggaattagctaaattggattttgcaatggtgcagtcaatgcatcagaaggagttagctgaaatttctcgatggtggaagaacttgggtcttgtcgagaggcttggttttgctagagatagacccgcagaatgctttctgtggactgttggtacctttccagagccgagatactcaaactgtcggattgaattaactaaaaccatttgtattctgctagttatggatgacattttcgacacttatggtacacttgaagaattagtattatttacggaagcaataaagagatgggatttagatgccatggaacagttaccagaatatatgaaaatctgttatatggctttattcaatacgactcatgagatagcttacaaaatacaaaaggaacatggtcaaaccgtggttgcttgtcttaaacgtacttggattgatatttttgaagcatttctcaaagaagccaaatggttcaataatggctatatcccaacattcaaggaatatttagacaatggtgttatctcctcagggtcgtatatggcgctagtgcatgctaccttcttaataggtgactcactgtccaaagagactattagtattatgaaaccatatcctaggctcttttcatgcagtggcgaaatacttaggttatgggatgatctcgggacatcaagagtattgattcatttggacactcacttatttccatct

SEQ ID NO: 987 - DNA, 1626 bp, Cajanus cajan
atgtctagtatgttccaacctcgcaatttaagcttaaaaacaagcaggcctcccatgatctataataatctttcaattaaaagcattgctttcagagataaggtgccttcccaaactgacccttctacgagaaacctagaacaggttaaaagaagatcacaagaattactgttgaatagcagagatccaattaagaccttgaagatcatcgacaacatacaaagactaggtatcggacatcactttgaagaagagattaacgtgcagctcggaagagtaggtgactgggacgttacccaagacttattggcaacagcactccaatttagactattgaggcacaacggatggccagcacggtccgatgcgtttaagaagtttctagacaacactgggaacttccaggaatccatcacaaacgatatccgcgcgatgttaagtttatacgaagcttcttatttaggtgcgaaaggcgaggaaatcttacagcaagcaatggatttttctactgctcatcttcatcaatctttgccgcatttatcaccagaattgggaagaattgtagcgcgcagtttgactctaccgcgtcatttacgaatggctcgattagaagccaaaaactacatggaagagtactcgcaagcttcatcccaaattcccagtttactagagctagcaaaattggaccatgttatggtccaaatgatgcatcaaaaggagcttgccgaaatttcaggatggtggaaaaaattaggtttagttgaacgtctaggttttgcacgggatagaccagaagaatgctttctttggacggttggagtcttccccgaaccatattattcaacctgtagaatcgaactaaccaaaactatttgcatccttttggtcatggatgatatttttgatacatatggaactcttgacgagctgattttgtttacaaaagctattaagagatgggaccttgatgcaatggagcaattaccagaatatatgaaaatttgttacattgctctgtataatactacccacgagatcgcaaataaaattgaaaaagctcacggggaatcggttgttgcctgcctcaagaggacatggacagatatattcgaagcgttcctgaaggaggccaaatggttcaacaacaaatacatccctacgtttcgcgaatacctagataacggagtgatttcatctggttcttatatggctatggtacatgcgacgtttctagtaggggacggtctttctaaagaaactatcagcatgatgaagccataccctcgactcttttcctgttccggcgaaatactaagactgtgggatgatctgggtacgtcacgggaagaacaagagagaggcgataatgcttgttcaatccagtgcttcatgactgaaaacaatatttccgatgaaaacgtagctaggaaacatattagagaacttatccgaaatttatggcccgaattaaacgggttagcaatgactactagtgcccttcctctttctgtaatgaaagcctcgttgaacatggctagaacggctcaagtgatataccaacatggagatgaacaaaatgccttcacggttgatgactacgtaaagacattattatttacccagcac

SEQ ID NO: 988 - DNA, 1878 bp, Cajanus cajan
atgttgcaaacactccgaccaggtaccatgagaacaaaattatctatcaaaagcatttccttaccagatcaatttgggcccagagttatctatacacgtccggtcggatttttaccgatcaatcatgaatttggtttgagcagttcctatttatatagtgccaatagaatcttcacagatcaatctcgagtctggtcggtttttgagttattcattcttgcgcaaagcgatttttacagatcaataacgtccttggttttcgagttatttattttggcccaaagcgaattttgtagacaatcacgcgtttgtttaagggttatctatacacatccaatcgagttactgcctacaatcacttctttatacggtaagaagagtctggagcaattaaaaagatcctcacaagaagcattattgaatacttctgattctttgcgtactttaaagacaattgacactatccaaaggttgggtatagaacatcattttaaggaagagataaatctacaactaggtagactaactaactgggaaccagtagaaaacttgtttgctactgctcttcaatttagactgttaagacacaacggttggcctactagaagcgatgtgttcaataagttccttgataaatcgggtaacttcaaagagtctgttaccaaagatatttgggggatgttgtctttgtacgaatcttcatatttaggtacaaaggatgaagaagttctgcaacaagcgatggattttagcagagcccatctgcatagaagcttgccatatttatcgttggaagttaaaaacatcgttgggggagctttgatgttgccaagacatctgaggatggcccggcttgaagctaagaattacatggtggagtgtagaaagactagctcacagattccagatttgctgaaattagccaggttggatttcgatattagccaatcaatgcatcaaaaagaactggctgaaattagtagatggtggaaaaatctgggattagtggaatctatcggttttgggagagataaaccaggtgaatgttttctttgggtacttggtattttacctgagccctgttatagcaattgtcgtattgaattagcaaaagcaataagcgtactacaagtgatggacgatatgttcgacacacatggtaagttggatgaactggttccttttaccatggcaatcagaagatgggatttggacgcgatggaacagcttcctgaatacatgaaaatttgttatatggcattgtataacacaatccatgaaatagcatacagaatccagaaagagcatggcaaaactgtcataacctgcatcaaaagaacggtgcatattttcgaagcatatttaaaagaagccaaatggtttaacaacaaatatgtaccaacattcagggaatacttagacaatggagtaatttcaagtgcttcttttatggcccttgtccactctacattattgatcggtgataacctaagcgaaaagacaatatctatgatgattccatacccacgaattttctcctgcagcggggaaattctaagattatgggacgacttagggacaagtagggatgaacagaaaagaggagataatgcctgctcaatacaatgtttaatggctgaaaataacataagtgacgagaatgtagctagaaaacacattaggaaattaattgggaatttgtggcttgaattgaatggcctggcacttactacgactgacttcccactgagtgttgcaaggacatctcttaatatggcgagagctgcacaagccatatatcagcatggagatgatcaaagctcattgacggtagatgaccaagttcaagctctgctgtttacaccttccgccaactat

SEQ ID NO: 989 - DNA, 1563 bp, Vitis vinifera
atgagcgaagcggacagctcaactagaagaatgaaggaagttaaggagagaacttgggaggcgttctatagagcttgggattcaagagccgctatggaaatggttgatactgtggaaagattggggttgagctatcatttcgaggatgaaatcaatgctctgctccaacggttctgtgactggaatgctagcgaagatttgttcaccacagctctaagattcaggctactgagacaaaatggttttccaacccattcagatgtttttggtaaattcatggataagaatggaaaatttaaagagtcattaacagaagacattcgtggaatgttgagtttacatgaagctagtcatttgggtgcaaaaaatgaagaggttctggccgaagctaaggaatttacaaggatacacttgatacaatccatgcctcatatggaaccccatttcagttcacatgttggccgtgctctcgagcttcctcgtcatttgagaatggttagactagaagctcgaaactatattggtgagtactcacgtgaatccaatccgaacttagcgttcctagagttggcaaagcttgattttgacatggtgcagagtttacaccaaaaagaacttgctgaaattttgagatggtggaagcagttaggccttgtggataaactcgatttcgcaagggatcgcccgatggagtgctttttgtggaccgttggaatctttcctgatccacgacactcatcctgtcgaattgagttaacgaaagcgatagctattctgttagtaatagatgacatttacgattcctatggttcactagatgaattagccctttttacggacgcagtgaaaagatgggatttgggagccatggaccaattacctgaatacatgaaaatatgttacatggctttatacaatacaaccaacgacattgcctacagaattttaaaagaacacggttggtcggttattgagcatcttaagaggacatggatggatatcttcggagcgtttttagcagaagcctattgctttaaagggggccacgtaccatcattggaggaatatttaactaatgctgtaaccacaggagggacctacatggctctggtacatgccttctttcttatgggtcaaggagtgacacgagaaaatatggccatgctaaagccatatcctaatatttttagttgttctgggaagatattaagactttgggatgaccttggtaccgccagggaggagcaagaaagaggggataatgcctcgtccatagagtgttacaagagagagagggaaatggatacggtccttgaagatgaggcttgcagaaagcatataagacagatgatccagtccttgtgggttgaacttaatggtgaactagttgctagttcagctttgcctctgtccataattaaagccgcttttaatctttcccgtactgctcaagtcatctaccagcatggcgacgataataagacatcctcagttgaagatcatgttcaagctttactatttagacctgttagctctaatggtcatgcgcagattacaatgcac

SEQ ID NO: 990 - DNA, 1569 bp, Vitis vinifera
atgagcgaagctgatagctctacgagacgcatgaaggaagtaaaggagcgaacttgggaagctttttaccgtgcttgggattcgcgtgccgctatggaaatggttgacacagttgaacgtttgggactgtcatatcattttgaagacgaaatcaatgcattgttacagaggttttgtgactggaacgcctccgaagatttatttacaacagctttaagatttagactactacgtcaaaatggctttccaacccactcggatgtctttggtaaatttatggacaagaatggtaagtttaaagaatcgttaacagaggacatctggggaatgttatctttgcacgaagcttcacatctcggagctaaaaatgaggaggtattagctgaagccaaagagtttaccagaatacatttaatccagtcaatgccgcacatggaacctcatttttcgagtcatgtaggaagagcattggaactgccaaggcatctccgtatggttaggcttgaagccagaaattatattggggagtacagcagggaatcgaacccgaatttggcctttctagagctggcaaagttagatttcgacatggtacaatccttgcaccaaaaggaattggccgagattgttagatggtggaaacaattgggattggttgataaactggatttcgcccgtgatcgaccaatggaatgtttcttatggacggtcggtatattcccagatccaagacattctagctgtagaattgaactgactaaggccatcgcgattctactagtgatcgacgacgtctacgattcttatggtagtctcgatgaattggcgctttttactgatgccgtaaaaagatgggacttgggcgcaatggatcagctccctgaatatatgaaaatttgttacatggcattatacaatactaccaatgatatcgcgtacaggatacttaaagaacatggttggtccgttattgaagacttgaagaggacatggatggacattttcggtgcctttctagctgaagcccattgttttaaggggggacacgtgccttctttggaagaatatttaaataacgcggttactacagggggaacctatatggccttagttcacgcattttttttaactcgtcagggggttactcgagaaaatatggccatgttaaaaccatatcccaatattttttcatgttcagggaagatactaagattgtgggatgatctgggtaccgctagagaagaacaggaaaggggtgataacgcgtcctctatagaatgttataagagggaaagagagcgagaaatggatacagtcttagatgacgaagcctgtagaaaacatattaggcaaatgatacaatcactatgggtggaattgaacggagaacttgtggctagttctgctttacccttatctatcataaaggctgcttttaatttaagtagaacggcacaagtaatttatcagcacggggatgacaataaaacttcttcggtcgaagatcatgtacaagctttactttttagacctgtatctagtaacggtcatgctcaaattactatgcat

SEQ ID NO: 991 - DNA, 1554 bp, Glycine max
atggcattcaacgataacaaggttccctcccaaattgacctgagaacgaacaactttgagcaggtcaaaagaaattctcaaatggctttactgaactcttcggacccaatcaaaatactaaagatgatagatacgattcaaaggttagggatagaacatcatttcaaagaagaaataaatgtccagttgggcaaattaggtgattgggacgtgactcaggaccttttcggtactgcattgcaatttagattgcagagacacaatggctggccatcttgcagcgatgtttttaagaaattccttgataagtcaggtacctttaaagaatctataaccaatgatatatgggggatgttgtcactatatgaagcaagctatctgggtgcaaaaggagaagaagtcctacagcaggctatggatttttctaaagcacacctgcatcaaagcttgcctcacttgtcgcccgaactcagaaaattggtagctaaggctctcacattaccaagacatttaaggatgggtagattggaagcacgcaattatatggagaagtactctcaagcaaccaaccaaattccagcattgatggaacttgctaaattagattttgcaatggtgcaatcgatgcatcagaaggagcttgcagaaatatcgagatggtggaaaaatttaggtctagtagagagattagggtttgcccgagatcgtcctgcagaatgctttttgtggacagttggcaccttccctgagcctagatattcaaactgtagaatcgaactaacaaaaactatttgtatcttacttgttatggatgatatttttgatacttacggcactttagaagaactcgtcctttttactgaagctattaagagatgggatctcgacgcaatggaacagttgcctgaatacatgaaaatatgctacatggcattatttaatacaacacacgagatagcgtataaaatccaaaaggaacacggtcaaactgttgtcgcctgtttgaaaagaacttggatcgatatattcgaagcttttttaaaagaagcaaaatggtttaacaatggttatatccccactttcaaggagtatttagataacggagtcatatccagtggcagctatatggccttagttcacgctacctttttgattggtgattcactaagcaaggagacaatctccatcatgaaaccatatccaagattattttcgtgttctggtgaaattctaagactttgggacgacttaggtaccagtcgtgaagaacaagagaggggtgataatgcatgcagtatccagtgtttgatgaccgaaaataacttgagtgatgaaaatgttgctagaaagcatataaggcagttgatacaaaacttgtggccagaacttaatggtctagcaatgactactacagcgttgccatcctcggttatgaaggcatccctgaacatggcacgcactgcccaagtcatttaccaacacggtgacgatcagaatacatttacggtagatgattatgttaagacattaatcttaactccttccagtaattat

SEQ ID NO: 992 - DNA, 1443 bp, Lupinus angustifolius
atgtgctctactaaatccttggagcaagtaaagagaaaaatacaagagaccctgttgaattctgatagacttggaactttgaagataattgattctattcaacatcttggaattggccatcatttcgaagaagaaattaatgcgctgctgggtcgtgtccttgattatgacacggcacatgatttgtttgccacgtcattacacttcaggctattaagacataacggatttcctacatcatctgacatctttaaaaaattctgtgataaatcaggctactttaaagagtcattatcgaaagatatctggggcatgttgtccttgtatgaagcgtcatatttgggtgccgaaggagaagagttgttacataaagctatggatttctcaaaggtccatttgcataattccatttcacagctaggcccacaagtatctatgcatatagctaggagtcttattttacctagacatttaaaaatggctaaactcgaagccaagaactacattcatgaatactcccacgcctcaaatcaaatcccagccttgttggaattggccaagctggattacgatatggcccagtctttacatcaaagggagcttgccgaaatttgtcgtcaagctacattactcttatggtggaaagaattgggtttagttggtcgtctgggattcggtagggatcgtccagctgagtgtttcctatggacattgggtatctttccagaacctagctattctaattgtcgcatcgagttaaccaagactatctgtatcctattggtaatggacgatattttcgatacatacgggtcccttgatgatttgatccttttcactgacgccataaggcgtatccaaaaggaacacggcgttaccgttgttgctcatctaaaacgtacatggattgatatattcgaggcatttctcgaggaagctaagtggtttaataaaggttatatgccaacatttagagagtatttaaacaacggtgttatttcagccggttcatatatggcgatggtacatgctacctttctaataggcgacggtaattcaaaggaaaatatctctatgatgaagccctaccctaggttattttcatgttctggtgaaatcttgagattatgggatgacttaggcacttcaactgaagaacaagagcgaggcgataatgcgtgctctatacagtgtcatatgcgggagaataacatttccgatgagaacgaggctagaaaacatattcgcgagttcataggtaaattatggcaagaattgaatggtatcgccatgaacactaatctgccctggagcattgttaaggcttcattaaacatggctaggacagctcaggtgatttatcaacacggcgatgataaatcgacttatagcgttgatgaatacgttcaaacgctgctatttactccatcacccagaaattca

SEQ ID NO: 993 - DNA, 1635 bp, Handroanthus impetiginosus
atgtgctccggtgtcgcacccacatctacgacaccaattcgtattaattcatcactacaaagcactattcctatctctcctaaattgaagcagcaacaattaagaaaggttgacttggaatacactaagacgaatgaggaactgcgcgaaaagactagaggaaccctgcagaaggctttagatcctatggcagccatgaagttgatcgataccttgcaatggttgggaatatcataccattatgaagaagagattgacttctggttgggtaagctatctcaatgggacgcagatgatgatgaccttcacgctacagctttaagattcagactattacgccaaaatgctagaccggtttcttctgatgtatttaaaaaattccgtgtaaatggcaaattccggaagtccatttcggaagataaagagggtcttctaaatctatatgaagcgtcatgtctgggtaccaatggagaagatatcttgagtgaagctgctaagtttaccgaaaatgaactgaaactttcaagcgcaaatggcatattgcctaaacatatttcaagacgtgtgggaagagctttggaattgccaagacacatgagaatggaaagattggaatctcggttatacatagatgagtacaatattcaagagaaccatagtcttctcttattagaacaagcaaaggctgactataatgaagttcagcttttatatcagagtgagctagcagaaatgtctagatggtggaagcaattgggcctagtcgagaaattaacattcgctcgtgatagacctatggaatgtttcctgtggacagtggggattttccctgagccaaagtactcatctttacgagtagatcttgcgaagactgttgcaattcttttagttatagatgacatattcgatacatacggaaccatcaacgaattgtctcttttcaaaagcgccatccaaagatgggacttggatgcgattgaacaactgccacagtacatgaaaatttgttatatggcactatataatactacaaatgaaatcgcatataaagttcttagagaacagggcagaaatatccttcctttcttggaaaaagcatggattgatgccattgaagcatttatgatagaggcagaatggttcaataacggccatacacctagggttgaggattatttggagaatggcgtaactacgtctggtgcttacatggccctagttcatgcctttttcttgatgggcgagggtttgactattgaaaacgtaaaattgatggcgaaaccctatccgaaattgttttctaactcggggagaattttgcggctgtgggatgatctaggcacagcgaaggaagagcaagaaaaaggtgataatgcctcatcaatttctcttttaatgaaagaaaaaaatatggcacatgaagatgaggctagagcatataccatgaaactaatccacaatttatggaaggaccttaacacagaactattgggcagtaacatgttgccattgccgataatccgggcctgtttcaacatgagcaggacatcgcaggtgatatatcaacatcaagaagacagttactttagtagtgttgataaattcgttgatttgattctattcaaaccaatagcg

SEQ ID NO: 994 - DNA, 1635 bp, Handroanthus impetiginosus
atgtgcagtggagtagctccaaccagcaccacacccatcaggattaactcctcgttacaatctaccattccaatttcacctaaactaaaacaacagcaattaagaaaggtcgatttagaatatacgaagactaacgaggagttaagagagaaaacccgaggcactttgcaaaaagcactagatcctatggccgctatgaaactaattgatactctccaatggctggggatcagttatcattacgaagaagagatagacttttggctggggaagttgtctcaatgggatgcagatgatgacgatttgcatgcaactgccctacgttttaggttactaagacagaacgctagaccagtttcaagtgatgtgttcaagaagtttagagtaaatggtaaatttaggaaaagtatcagcgaggacaaggaaggcttactaaatttgtatgaagcaagttgcttaggaacaaacggtgaagatattctatcggaagccgcaaagtttactgaaaatgagttgaaattgtcgagcgccaatggtatcttacctaaacatataagccgcagagtcggcagagccttagaactgccgaggcatatgagaatggagcgtttggaaagtagactctacatagatgaatataacattcaagaaaatcattctctgttactcttagaacaagctaaagcagattacaatgaggtacaattattgtaccagtccgaattagctgagatgtcaagatggtggaaacagttaggtttggttgaaaaattgacattcgctagagacagacctatggaatgttttttgtggacggtcggtatctttccagaacctaagtacagtagtttacgagttgacttggctaaaactgtagcgatactgctggttattgatgatatatttgatacctatggtacaattaatgagctgtctcttttcaaaagcgcaatacaaaggtgggatcttaatgctatcgaacaattaccacagtacatgaaaatttgttatatggccctatacaatacgacaaatgaaatcgcatataaggtacttcgtgaacagggtaggaatatattacctttcctggaaaaagcttggatcgatgcaattgaagcttttatgattgaagctgagtggtttaataatggtcacactccaagggtcgaagactacttagagaacggtgtgactacatctggagcttatatggccttagttcacgccttctttcttatgggagagggtctgaccattgaaaacgttaagttaatggcaaaaccataccctaaattgttttcaaattcgggcagaatcttaagattatgggacgaccttgggacagctaaagaagagcaagaaaagggagacaatgcatcctcaataagcctattaatgaaagagaagaatatggttcatgaggacgaggccagggcatatacgatgaaactgatacataacctttggaaagacctgaatacagagttgttaggttctaatattttacccttgcctattatcagagcttgtttcaatatgtcccgtacgtcacaggtcatttatcaacatcaagaagacagctatttttcttcggtcgataaattcgtcgatttgatacttttcaagccaatcgct

SEQ ID NO: 995 - DNA, 1473 bp, Lactuca sativa
atggctctgatgaccgactctaaccctataatccttatggaactcgtcgataagattcagagacttggcttgggatgcacattcgaagaggacataaacaagataatgaagtatttggtgcagggacatccaaatgatgatttatacaccgtttcattaaggttcaggcttttgagacataatggactacatgtaaaccccgatgtgttcggttcgtttatggatgcaaatggcaagttcaaggaatcattaagcgaagacatcgaagcacttctatccttgtacgaagcttcctatatgggtgcagatggcgaagacattctttcagaagcaagagaatttaccactcggcatcttaagaaatctgtatttaagctaaccccattactgagaaataaggttcttcaatctctaaaacttccaagacatttaaggatggaacgtttagaagctcgtatgtacatcgaagaatacggtaacgagcaagaccatataccaatattattggagctcgctaagctggaatataatgaaatccaaatacttcaccaaatggaaatttctgaaattacaaggtggtggaaacacttaggtctcaccgataaacttccgtttgcaagagaccgtccattggagtgttttttgtggaccgtcgggcttcttccagaaagaaaatattctaccaaaagaattgaggttgcaaagacaatcagcatccttctagttatcgatgatatatttgacacctatggttcttacgatgatttggttcttttcacaaaagcgattcaaagatgggatatgcaggagatcgagcagttacctgaatatatgaagatctgttatatggccttgtgtaacacaactaacgaaatttgctacgaaattctcaaagaacacgggttaaatgtattgccattcttgagaaagacttggattgaaatggtggaagcctttatggttgaggcagagtgggtgaaacgaggtacagagcctaacttgaaggattacatagaaaatggagtaaagactgcaggtacgtatatggccttggtgcatttgttcttcttaataggtgaaggcgtgacccccgaaaatatgcgtactttaacagacagttatccatcattcttcagtatctctggtaccattctccggttatgggatgatttagggacttcaaaagaagagcaggaaaggggagatgtcgcatcgtccattcaactgctgatgaaagaaaaaaatattacatgtgaggaggagggtaggaaatacattctacaattcatcgattcgagttggaaagaattgaataagactttggtggttccaaatacactaccgattagtataattaggatagcccttaatatggctagggcgtcacaagtggtctaccaacacgaagaatctagctattttagtagagttgacaatcatgtcaaaagtttgttttttgctcctatccaaata

SEQ ID NO: 996 - DNA, 1599 bp, Parasponia andersonii
atgtctatgcagtcgtcgaagccagagacgcaacaccatgacagtctcctgaagagtttgctcttgcaacatggtgttgtaacagaccatgatgatagttcctctaccaaaagcactagtgaggaacattttgtcaaagtgcaaaaagccctgaggaagccttccactcaaaggacaaaaatgcggttgattgattcaatacaaagattaggtgtcggacaccattttgaagaaatcaaacagatcttggagggattcagcgatcttaactcctctgaggacaatctttttgatactgctcttagatttagattgttaagacataatggtttacccacgtcctctgacgtttttgaccaattcattaacaaggaaggtgaattcaaggaatcgctttctcaagacacctgtggcatgctttcgttatatgaagcctcttatcttggtgctaaaggtgaagataaacttcataaagctatggaattcactagatctcatctgaaacaatctatgtcctccgttagcccggaattacaaacacaagtagcgaaagcgttagaattgccaaggcacctaaggatggctactttggaagccaggaattacattgatgaatattcacaggaatctaaccacaactcggcgctcctagcattagccaagttagaattcaatgaactacaaagtttgcataaaagggagcttacagaaattatcagatggtggaagcagctgggccttgtagataagttagggtttggcagagatcgtccctgcgagtgctttctatggaccgtcggtattttgccagaagcctcttactcaagcattcgtgtagaactggcaaaaacgatttctattttgttggttattgatgacatttacgatacctatggcagcttagacgaattagttctgtttaacgaggcgattaggagatgggagctgggagctatggatatgttgcttgaatatatgaaaatatgctacatggctttgtataatacaactaatgaaattggttaccgtgttttgaaggaacatggttggtgtattactgaacatttgaagagaacctggatcgatatatttgaggctttcctgacagaagctgaatggtttaataaaaaacatacccctacattagaaccatatttaactaatggagtgacatcaggtggctcatacatggccctggttcactcttttttcttgatcggtcatgacttgacagatgaaaccattagtttgatgcagccctatccagagctcttttcttgctctggaaagattttgagactatgggatgatttaggcacggcaaaagaagaacaggagcgcggtgatgttgccagtagtattgaatgttatatgagagaaaaaaacatcgagtttgaggacgaggctagaaagcacatacgagaacttataagaagtttgtggatggaattgaacggggaattacgagcgtcctctgcactgccgcgcagtataacgaaggcttgcatcgatctggcaaggacggctcaggttatatatgatcaaagttttttcaacgtagaagatcacgttcaaagcttgttcttcagaccatataat

SEQ ID NO: 997 - DNA, 1635 bp, Trema orientalis
atgtgtcagactggttcgccattaagcatgcaaagttcaaagccagaaactcaacaccatgacagcttactcaaaagtctactcttgcaacatggagtagttgcggatcaccatgatagttcaaacacaaaatcgacctctgaggaactgtttgtgaaggtccaaaaagttttgaggaagccgtctacccaacggaccaagatgaggctcatagattccatccaacgtttaggagttggtcatcattttgaagaggagatcaaacaaatcctggaaggatttagtgatctaaattcttcggaagataatcttttcgatacagctttgaggtttaggttattgagacacaatggtttaccaacatctagcggcgttttcgaccaatttataaacaaagaaggggaatttaaagagtctctaaaccaagacacatgcggtatgttatccctatacgaagcaagttacttaggagctaaaggtgaagataagttgcataaggccatggaatttaccagaagccatttaaagcaaagcatgtcgagtgtgagtccagagttgcagacccaggttacaaaagccttagaacttccgaggcatcttagaatggctaccctggaagctagaaattatattgatgaatacagtcaggaaagtaatcataattctgctctcttggccttggctaaacttgagtttaatgaattgcaatcccttcacaagagggagctcgctgagatcattcgctggtggaaacaacttggtttggtggacaagttaggttttgctagagaccgaccgtttgaatgttttttatggacggtgggcatatttccagaggcgtcttattcaagtatcagggtggaacttgctaagactatttccatacttttggttgttgacgatatttatgacacttacggaagtcttgacgagctagtgttgttcaatgaagccataaggagatgggagctgggtgcaatggataagctacccgagtatatgaagatctgctatatggctttatataatacgaccaacgaaatcggttatagagttctgaaagaacatggttggtgtataaccgagcatctcaagcggacttggatagatatcttcgaggcgttcttaacagaagcagaatggtttaataaaaagcataccccaactctagaaccatacttaaccaatggtgtaacatctggtggttcttatatggcgttagttcattctttttttttgatcgggcacgatttaacagatgaaaatataagtttgatgcgtccatacccagagttatttagctgttccggaaaaattctgagactttgggacgatttgggaactgcaaaagaagagcaagaaagaggggatgtcgcaagctctatcgaatgttatatgagagaaaaaaacattgagttggaggatgaagctcgtaagcacatcaggggattaattcgctctttatggatggaactgaatggtgaactgcgagcaccttcggccttgcccaggtctataaccaaagcgtgttttgatttagctagaactgctcaagtcatatatcaacacggggacgatcagagcttctttaacgttgaagatcatgtacagtcgttattcttcagaccttgtaac

SEQ ID NO: 998 - DNA, 1605 bp, Unknown
  geraniol synthase
atggcctctgccgttccattatcttctacacctttaattaatggtgacaacagccctctgaagaatactcatcaacatgtggaagagaggtcttcaaaaagacgcgaatacttactagaagagactgctaggaaattgcagagaaatgacaccgaaagcgtagaaaaactgaaattaatagataatatccagagactcggtatcgggtattacttcgaagacgcaatagatgcagtcctaagaagtcctttctcagccgaagaagaggaagatttatttactgcagctctacgattcagattgttgagacacaatggcatacaagttactccagagattttcttgaagtttaaggatgaaaggggagaatttgacgaatcggatactttgggtctactgagcctttatgaagccagtaaccttggtgtcacaggtgaagaaattctcgaagaagccatggaatttgcagaaccaagactccgaagatcattatcagaattggcggcccctcttcgatcggaagtggcacaagctctagacgtacctagacacttgagaatggcacgactggaagccagaaggttcatagaacaatacggaaaacaaagcgatcatgacggagacttacttgaactagcaattttggattataatcaggtacaagcccaacatcaaagcgaacttactgaaattaccaggtggtggaaacaattgggtttggtggagaaacttgggttcggaagagacagagctctagaatgttttatgtggacgatgggcattttgccgcatccaaaatactctagttctagaatcgagtcggctaaggccgctgccttactctacgttatagatgatattttcgatacatatggaaaaatggatgagttgatattatttactgatgcgattagacgatgggacttggaagctatggaaggtctacccgaatatatgaaaatatgttacatggctttatacaacactactaatgaaatctgttatcgtgttttaaaggatacaggaagaatcgctttgccttaccttaaaagtgtctggatagaaaccatagaagcttatatggttgaagttaaatggtttagtggaggttccgctccgaaattagaggaatatatcgaaaatggtgcctccactgtgggagcgtatatggtgctagtccatctgttcttcttaatcggtgaaggtctcactcatcagaacgtcctatttttcaagcagaaaccttaccataaaccgttctctgcggccggccgcatttttaggttgtgggatgatttaggtacatcccaggaggaggaagaaagaggcgatatggcgtcttctattcgtctttttatgaaagagtataaattatctacggtcgaagaagcaagatcttgtgtcctggaagaaatttcgaggttgtggaaggatcttaacgagggtttaatatccataaaagacgctttaccattgacaattgttaaagtcgctctcaatattgcgagaacgagtcaagtcgtctacaaacatgaacaacatacttacatgttatcagttgataattacgttgaagcattgttctttactcctttgctgagctcc

SEQ ID NO: 999 - DNA, 1515 bp, Unknown
  geraniol synthase
atgcaacacatggaagagtcttcctctaaacgtcgcgaatacttgttggaagagaccacaaggaaattgcaaagaaatgacacagaatctgtcgaaaaattgaagttaattgacaatattcaacaattgggcatcggatactacttcgaagatgccatcaatgcggttttgaggtctcctttctcaactggagaggaggatctattcacagctgcattaagatttagattattaagacacaatggtatcgaaatttcacccgaaatttttcttaaatttaaggatgagagaggtaagtttgacgagtccgacactcttggcttgctatctttgtatgaagcttcgaaccttggtgtcgctggcgaagaaatcctggaagaagcaatggaatttgctgaagccaggttgcgtagaagtctaagcgaacctgctgccccgttacatggtgaagttgcacaagctttggatgtaccgcgacatttaagaatggctagattagaagcaagaagattcatcgagcagtatggtaagcaatccgaccatgatggagatctattagagttggctattttggattataaccaagttcaggcgcagcatcaatcagaattaaccgaaattattagatggtggaaagaattaggtctagttgataaattgtctttcggaagagatcgaccattggaatgtttcttgtggactgtcggtttgctcccagagcctaagtactctagtgttcgtattgaattggccaaagctattagtatcttgttggtgatcgacgacatattcgacacctatggtgaaatggatgatttgattctttttactgacgctatccgtagatgggatctagaggcgatggaagggcttcctgagtacatgaagatttgttatatggcattgtacaataccaccaatgaggtttgctataaagtcttaagagatacgggtagaattgtcttattgaatctcaaaagcacatggattgatatgatcgagggcttcatggaagaagctaagtggtttaatggtgggtcggctcccaaattggaggaatacattgagaatggggtaagtactgcgggtgcctacatggcctttgcacatattttctttctgattggtgagggagtcactcaccagaattctcaattatttacgcaaaagccatatccaaaggtattctcagctgcaggtagaattctgagattatgggacgacctgggtactgcaaaagaagaacaggaacgcggagacttagcctcttgcgttcagcttttcatgaaagagaaatcactgacggaagaagaggccaggtctaggatattggaagagattaaaggtctgtggcgagatctaaatggcgaactagtttacaataaaaaccttcctctgtctattataaaggttgcgcttaatatggctcgtgcctctcaagtcgtgtataagcacgaccaagatacctatttctcaagtgtggataactacgttgatgccttattttttacacaa

SEQ ID NO: 1000 - DNA, 1587 bp, Ricinus communis
atgatctcaaccatctcccagcctacgcgtaaagaaccggccacaacaaaacctgagatcatggaagagttacatgaggggacaagaaaggaattattgacttcgtcttcaccaattgccacaatgaagcttattgactccattcagcgattaggagttggttactacttcgaggaagaaatcaatacattattagatcgattcttagatttagagaccacggaagaccttctagctaccgctttgcgatttagattattgagagataactgcttcccagcacacagtgatgtttttggtaagtttatgaataaagatggtaaatttaaagaatcccttaggaaggatgtttggggtttactatctctgtatgaggcgtcatacttagggactaaggatgaagttgagctagttgaagctatggaatttactaaaacttgtcttgaagaacagtctataccacttatggcacataagctgtctaggcacgtctctcaggccttagatttgcccagacatctaaggatgcctcgtttggaagcacgcaactacattcatgaatactccttagaatcaaacaatagccctccattgttggagctagcaaaactagaatttaatgcagtccagtctttacatcagaaggaattaattgagattgttagatggtggaaacagttgggcttagtagataagttaggattcgcacgcgatagaccattagaatgctatttgtggactgtcgggattttccctgaaccatataactcaacatgtagaattgaattgaccaaaactattgccatccttttagtaattgatgacatcttcgatacttacggtagcttacctgacttgatattattcactgaggctgtccggagatgggatctaaatgcgatggaatcactcccagaatatatgaagatttgttatatggccttatataacacgactaacgacattggatttatgattttgaagcgacacggactctctatcgtcccacatctcaaaagaacttggatagatatgtttgaagcttttctcacagaagcaaagtggtttaatagcggttatgtaccaactctcgaagaatatttggataacggtgttactacgggaggcacttatatggctctggtccatagttttttcctgatgggacagggagttaacaaagaaactgtcaccatgatggaaccctatcccgatctgttctcattgtcaggccgaattctacgtttatgggacgatttaggaaccgcaagagaagagcaagaacgcggggacgttgcttgttcgatagagtgcttaatgcgcgagaaacgcatctcatgtgatgatgaaggtcggaaacaagtgcgtcagttgattaggtccctgtggacagagctgaatggggaacttattgcacccagtgcgatgcctttgtctataattaatgctagcttgaacttagctagaactgctcaggttgtctatcagcatggagacgacaaaaaaggaagtagtgtagacaatcaagttcaggccttgatatatattccaatctcctttccaaaaaggagagacttaaaattatta

SEQ ID NO: 1001 - DNA, 1611 bp, Medicago truncatula
atgttgcaaaaatctagtagtagaataatgcactcgaaattgagtatcaaatctatagctttaaatgaaaaattgtctcctttacagacagaagataaaactaaatctctcgggcaggtcaaaagacgctcaagggaggctctagttaatagcaatgatcccatcgtaaccctaaagatgatcgatagcatccaacgtctgggtataggccatcatttagaggacgaaataaacatacagctgggacgtatttgtgactgggacctttctcaagatttgtttgcaacatctcttcagtttagattgttgagacataatggctggactacctgctctgatgtgtttagaaagtttttggataagtcaggtaatttcaatgagagtctaacaaaggatgtttggggcatgctttctttatacgaagctagttacttaggtactgaggacgaagaaattctaaaaaaagccatggaattttccagggctagactgtcagagttaattccgcatctgtccccagaagtgggcaggaacatcgccaaatcactaactttacctaaacaccttagaatggccaggttggaagccagaaactacatggaagaatacagtaaaggatccaatcagataccagctttgttggaacttgcaaagttggattccgatatggttcagtcccttcatcaacgagagttagcagaaatttgtagatggtggaaagaacttggtctagttgaaaaactaggtttcgctagagatcgtccaactgaatgttttttgtggactgtaggtatattccctgaaccttgtcattccaactgccgcattgaattgacaaaaactatatgcattctgttggttatggacgacatatttgacacctatggaactctcgatgaattagtactttttaccaaggctataaaaaggtgggatctggacgcgatggatcaattacctgaatatatgaaaatttgctacatggccttatacaatacaaccaatgaaattgcctataaaatccaaaaagaacatggtttgacagtcgtaagttaccttaaaagaacttggatcgacattttcgaagcattcctagaagaagcgaagtggtttaataatggctgcgtgccaaattttaaaacatatctagataatggcgtcatttctgctggctcttgcatggcattggtccacgctaccttcctaataggcgatggcttgtctaaggagactatgtccattatgatgaagtcgtatccgaggttgttcacatgctcgggtgaaattttgagattgtgggatgaccttgggactagtacagaagaacaagaacgaggtgataacgcttctagtattcagtgcatgatgagagaaaacaacatttccgatgaaaacgaagggagaatccacattagaatgcttttaggtaatttgtggcgtgaactcaatggtttggcaacgacgaaaacaataccactgtctgtagtcaaagcatctttaaatatggcacggactgcgcaagttatttatcaacatggggatgatcaatctacctttacagtggatgattacgtccagaccctaatcttcacgtctttaccaacctctcat

SEQ ID NO: 1002 - DNA, 1632 bp, Cicer arietinum
atgagttcaacctatagaagtcggttcttatcactgcaaaagagtaagttaggcacgatgcattgtaaattttctataaaatcctcagcattgaatgataaggtagtacccttgcaatccgatgatagaagcaaatctttggagcaagtcatcagaaagagccgtgaggtgttgttaaaatctaatgacccaattgctactctcaagatgattgatagtattcaaggtttggggatttctcatcatttcgaagatgagataaatattcagctaggcagaatctgcaactgggatgccagtcaagatatttttgcaacatcgttgcagttcagattattgagacattacggttatcccacaacttccgatattttccggaaattcttggataaaagcgggaactttaaggaaagctttaccaaggacatctggggtatgttaagtctatacgaagcgagctatttgggaactgaagatgaggaggttctaaagaaggctatggaatttagcaaaacacaccttaatgaattgattcctaatctggcacctgaggtaggctcgcatatagctagggcattaacaatccctaagcatttgagaatggtcagattagaagcccggaactacatggaagagtatagacaggcgactgatcaaattccagcattccttgaattggcaaaactagatagtcaaataattcaaagcctgcatcagagggagctagaagagattttgaggtggtggaaggaattaggattagtggatagattgggttttgcacgtgatagacccaaggaatgttttttatggacggtgggaatatttcctgaaccctactatacaaattgtagaatagaaattactaagacgatatgcatcttggatattatagatgatatatttgatacatatggtacgttacacgatttagttttatttaccaaggcgataaaaagatgggatttgaatgcaatggaacagttgccagaatatatgaagatttgttacatggccttgtataatacaaccaatgaaattgcctatagaatacaaaaagaacagggtctgacggttgtttcataccttaagcgaacatggatagacatgtttgatgcatatcttgaagaagcaaagtggtttaacagcagatacgtaccgagcttcaaaacttatctcgacaacggggtaatcagttcaggatcctgcatggtcttggtacacgctacatttttgattggtgatgatctgtctaaagaaactatcagtatgatgaatagctatcctaggctattctcttgtaccggagaaattcttcgactttgggacgatttgggaacctccaaggatgagcaagaaagaggtgataatgcttgctcaatacagtgtttaatgaaggagaataacattcttgatgaaaatgtcgcacgtaagaacattagactgttaatcggaaaattatggagagaattgaatggactggcaatgacaaaaaccgtcccattatctattgttaaggcatcattgaacatggctagaacatcgcaagttatatatcagtatggagatgacaagtctacttttaccgtcgacgaatgcgttcaaactctcatatttacttcgttacccaga

SEQ ID NO: 1003 - DNA, 1593 bp, Glycine max
atggctttctctgaaaaagttccaagccagacatattatcctggtatgaaggactttgaccaggttaagagaaaatcgcaagaggctcttttaaatagtagtgattccttgagaactttagaaataatcgatactatacaaaggcttggtatcgaacatcattttgaaaaagagatcaatttgcagttgggtagaataggcgactggaacgcggcagaagatttatttgctacttccttacaatttagattattgagacactatggttggccaacatgttctgacgtattcaacaaatttttggatcagagcgggaattttaaagaaagtgttacaagggacatttggggcatgcttagtttgtatgaagcctcatacttaggtgctaagggcgaagaagtccttcaacaagctatggactacagtagagcacatctctgccaatcgttgagcgatctatcaccaaaagttgggtcgatcgtcgttgaagcactaaagctccccagacatttaagaatggggcgattggaagctaaaaatttcatggtcgaatattctcaggcttctaatcagatcccagcattacttgaactggctcgattagattacgacatgatacaaagtatgcaccaaaaggaactcgctgaaataagcagatggtggaaagaattaggacttatcgaaagactcggcttcggtcgggatggtcctagagaatgttttttgtgggtcttaggtatcttccctgagccaagatactccaactgcaggattgaacttgctaaggctatttgcatcttacaagttttggatgacatgttcgatacatatggaacattagatgaactaatcctgtttaccaaggcaatcaaaaggtgggacctagatgttatggaacaattgccggaatatatgaaaatttgctatatggcgctatataacaccacccatgagattgcgtataagatacaaaaagaccatgggcagacagtcgttgcatgccttaaaagaacatggatcgatctaatcgaggcctacttaaaggaggccaagtggtttaataataagtatgtaccaacgtttcaacaatatttggacaatggagtcatttccagcggtagctaccttgcattagttcatgcatcttttttaatcggagatgacttcagcaaggaaaccatatctatgatgaatccaccctacccgcggctgttctcttgctcgggtgaaattctgcgtctatgggatgacttaggtacttctagggatgaacaggaacgcggcgataacgcgtgctcaattcagtgtttgatgactgaaaataatatctcggatgaaaatgtggcaagacgccacatcagaaaattgattaaaaacttatggccggaacttaatgggttatcaatgactactactaccacgacactcccattatcagtcatgagagcttctttaaacatggctcgtacttcacaagttatctaccaacatggggattatcaatccatgcttactgtggatgaccacgtgcaagccctcttgttcactcctagcattaattatcaggatgaatcagatattaaccatgttatt

SEQ ID NO: 1004 - DNA, 1584 bp, Glycine max
atgtccgtggcttttagtgacaaagttccctctcaaacatacttaggtacaaaggacttagaccaagttatcagaaaaggtcaggaagccctgttgaacagcagtgatccattgcgtacgttaaaaatcatcgatacaatacagaaacttgggattgagcatcactttgaaaaagaaattaatttacagttgggtagggttggggattgggacaccgcagaagacctatttgcaacagccttgcaattccgactattgagacataatggatggcctacgtgttcagatgttttcaataagtttctggataagtccgggaactttaaggaaagcgttacaagagatatctgggggatgctctcgttgtacgaagcatcctacttaggtgcgaagggtgaggaggttttacagcaggcaatggattacagtagggcccatttgtgtcaatctttgccacatttatcacccaaagtcagatcaattgttgcagaagctctgaagttaccacggcaccagaggatggtcggtctagaagcgaagaattatatggtggaatattctcaggcatcgaatcaaatacctgccttattagaattagcaagactagattatgatatgatacaatctatgcaccaaaaggagttagccgaaatttctaggtggtggaaagaccttggattaatagagcgattgggttttggtagggatggtccaagagaatgttttttgtgggctctcggaatttttccggaacctagacactcttcttgtcgcatagaattggccaaggccatctgtgtgcttcaagttatagatgacgttttcgatacttacggcactttggacgaattagtcttgtttacgaaggctattaaaagatgggatttagatgccatggaacagttgccggagtacatgaagatatgttatatggcgttgtataacacgacacatgagattgcttataaaatacaaaaagaccattcactcactgtcgttgcttgtttaaagattacgtggattgatttaatagaagcttacttaaaagaagcaaattggtttaataacaaacatgtcccgacgttccaacaatacctcgataacggagttatatcttctggttcttacttggcactagtccatgccacgttcctcattggggatgatttgtctaaagaaaccatcttcatgatgaatccttaccccagattattttcctgcagtgggaaaattttaaggttgtgggacgatttaggaacttcaagggatgaacaagaacggggcgacaacgcatgctctatacagtgcttgatgaaacaaaacaacatcagcgatgaaaacgtagcaagaaagttaattcgacagcttattgacaatttatggccagagctaaacggattgacgatgactactaatttaccattatccgttatgcgtgcttccctaaatatggctaggacttcccaggttatttaccgtcatggtgacgatcagaacatgcctacggtcgatgaacatgttcagaccttgttattcactccctctattaattatagagatgaaaacgacatcaatcatgtcatt

SEQ ID NO: 1005 - DNA, 1557 bp, Phaseolus vulgaris
atgtcccaaactaactctacaattacgagtctggagcaactgaagatcagaagccaaaaggttctattgaactcttctgactcgttgaggaccttagaattgattgacaccattcaaagattaggtattgaacatcattttgaggaggaaattaatttgcagttaggtcgtgtgggtgattgcaataatgcgaaggacctatttgctactagtttacaatttaggttgttacgacataatggatggtccacgtcctccgatgtctttaataacttcctagataagtcgggtaactttaaagagagcgtcactcgtgatatttggggaatgttgtccttatacgaagcctcctacttcggcgctcagggcgaggaagtcttgcaacatgccatggaattttccatggcccacttgcaccaatctttgccgttattatccccatatgttggcaaagttattgtcgaggccctgaaacaccctagacatcaacgtatgtctagacttgaggcccgaaactacatggttaagtattcgaaagaatctaatcaaatcttagctctattagaattcgctcgcttagaatatgacacagtgcaatccatgcaccaaaaagaattagctgaaatatcaaggtggtggaaaaacttaggcttgattgaacgtttgggttttggcagagatggtcccagggaatgcttcctatggatgttagggattttcccagaaccttgctattcgaactgtcgtatagaattagctaaagctatatgcatcttacaagttctagacgatatgttcgacacatacggtaccttggatgaattaatcttattcacagaagcaatccaacgttgggacttagacgccatgggaaagctgccagagtatatgaagatttgttacatggcattatataacacaacccatgaaatagcctataatatccagaaagatcacggacaaaccgtagtagcttgcttaaagaaaacttggattgacctgttggaggcatatttgattgaagctaagtggttcaataaaaagtacgttccagcctttggcgaatacttagataatggagtcatctcttctggctcgtgtttagcattggtccatgcaactttcttgatcggtgataatttatctaaggaaacaatatccatgatgagtccatatcccaggcttttctcatgctctggtgaaatcttgcgtttatgggatgatttgggaacgtcaaaggaagaacagaaaagaggagataatgcctgctcaattcaatgtctaatgaaggaaaatgatatatcagatgaaacttttgctaggaagcacataagacaggtcctgggtaatttgtggagtgaattaaattcacttgtgatggctactaccacactgccttttacgattagaaaagcgtccttaaacatggcaagaacttctcaatttatctatcaacatggcgatgatcaaactatgccaaccgttaacgatctcgtaaaattactgatctttactccttcaaagtcgggcgaggaaagcaatacaaattgtgttgta

SEQ ID NO: 1006 - DNA, 1572 bp, Phaseolus vulgaris
atgcaaaagatgccatctcaaactaatccgatgactacttcacttgaacagctaaagataaaaagtcaagaagtgttattgaattcttccgacagtttgagaactttaaagcttattgataccatccaaagattaggaatagagcatcacttcgaggaagagataaatctgcaactcggtaaagtcaaggactgtaacaacgcaaaagatatattcgcaacggccctacagtttagattgttacgacaaaacgggtggtctacgtctagcgacgtatttaacaaatttcttgataaatctggaaactttaaagagtcagttaccagggacatatgggggatgctgagcttatatgaggctagctacttcggtgcccaaggagaagaggtgttacaaagagctatggaattctctatggcacacctacaccagagtctcccactgctatcacctgaggttggtcgtgtagtcgtggaggctctcaagctacccaggcaccagagaatgagccgactggaggctaagaactacatggtccaatataacaaagaatcgtcacaaattccagctttgttacagtttgcaagattagaatatgataccttgcagttaatccaccagaatgaattggttgagatatcaagatggtggaagaaccttggattaatagaaagattgggttttgggagagatggtcctagagaatgctttttgtggatgcttggtgtattcccagaaccctgctactctaattgccgcattgaattggcaaaggcaatctgtattttacaagtacttgatgacatgtttgatacatacggtaccttggatgagttgattctatttacggaggctgttcaacgttgggatctagatgccatggagaaattgccggagtatatgaagatttgttacatggcattgtataatatcactcatgaaattgcctacaaaatccaaaaggatcacggtcaaacagtcgtggcatgtttgaaaaaaacatggattgatctgttggaagcttacctaattgaagcgaagtggtttaataacaaatatgtaccaacctttggggaatatttggacaatggcgtcatttcaagcggtagttgtttagcattggtccatgctacctttctaattggggataatctttcaaaagaaaccatatctatgatgtctccatatcccaggttatttagttgcagtggcgaaattcttagactatgggatgacctcggtacgtccaaggaagaacaaaaaagaggcgataacgcgtgttctatacaatgcctaatgaaagaaaacgacatatccgatgaaacatttgcccgtaaacacattaggcaagtaattggaaatttgtggtctgagctcaattccttggtgatagcaactaccaccttaccattcacaatccgaaaagcatcattaaacatggctagaacatctcaattcatataccagcatggcgatgaccaaacgatgccaaccgtgaacgatctggtaaacgttctattgttcacgccttcttctaaaagtagagaagagtctgataccaattttgtagtt

SEQ ID NO: 1007 - DNA, 1599 bp, Phaseolus vulgaris
atgtgcaaaacttcgacaccaacaattatgcaattaagtatcaattccttgcctttaactcaaaaagttccatctcttatcgatttaggtactaagaggatggaacaagtcaagcgaagatcacaagagactttattgaactcatcagacccaatcaagacattgaaaatcatagatacaattcaaagattaggtataggacatcactttgaagaagaaattaacgtaaaattgggtaagttgagagattgggatttctctgaagacctcttctctactaccttacaatttcgtctgttacgtaataacggatggcccactagcagcgatgtgtttaaaaaatttctcgataaaagtggtaattttaaagaaagtatcacgaatgatatatggggaatgttatccatgtacgaagcatcatatttgggagctaaaggtgaggaagtactcgagaaggctatggatttttcgaccgctcatttgcaccagtcactacaacatttgtctccagacgttggtaacttggtcgcgcgagcgcttacgctcccacgtcacttacgcatgtcaagactagaggctaggaattacattaaagaatattcacaagttagttctcacatgccttacttactcgagatggctaagatcgattatgctatgcttcaaagtatgcaccaaaaggaattcgctgaaatttcaagatggtggaataaactcggtttagccgagcgtctagggttcgctcgcgataaaccagctgagtgttttctgtggactatgggtattttcccagagccatgttatagtaattgtcgtatcgaattaaccaaaacgatctgtatactattagttatggacgatatcttcgatacttatggcacgctagatgaattaatcttgtttacgaaagcgattaaaagatgggatttagatgctatggaacaattgccggaatatatgaagattagctatttggcactttataatactacccatgaaatagcctataaaatacaaatggagcatggtcaaaatgtcatttccagcttgaaaagaacatggatcgatatatttgaagcatttcttaaagaagccaagtggttcaacaataaatatgttccaactttccaagaatacttagataacggcgttatatcttcaggatcatacatggctttggtgcacgcaacattccttattggtgatgggttgagtaaagagacaattagtatgatgaacccctatccaagacttttttcttgttctggtgaaattttaagactgtgggacgatttaggtacttccaaggaagaacaagagcggggcgataatgcatgcagtatccaatgtctaatgatcgaaaataacattagtgatgagaacgtggcgaggaaacatatcagaaggtttattcgtaacctatggccagaattaaattctttggtgctgactacgacttcgttacctttttctataatgaaagcatccttgaatatggctagaactgctcaagtgatttaccaacatggtgacgacaggaacactttcactgtagatgattacgttcaaactttactctttaccccttccgcaaattat

SEQ ID NO: 1008 - DNA, 1710 bp, Morus notabilis
atggaagcttactcccctaagaagaagttaaactttgcaagacatagtgatagcttatcatgtaaatgtcaatctcaattatcgccaactactcaaccctccactctagaaatttcacataatgaaactctattaaaatcgctcgttctgcatcaagaagttgtctctaaccaagcatatcaccacgaacatgatccatcttcagtatcgtcgacgtccgacgagttgatagccaaaataaaaaaagctttgagagaaccctcctctcaaagagctaaaatgaaattagtcgatgtgattcaaagattaggtgttgggcaccattttgagaaggagattcgcttactactagaaggttttcttgactataactcaaatgagggtctctacgatgcagctttgcgttttagactacttagacataatggccttccaacatcatcagatgtattcgacaaattcatgaacaataaaggtgactttaaagaatccctgagacaggatatctggggtatgttatcactttacgaagcttcctatctcggtgctaaaggagaagacaagctactgaaggcgatggaatttacccgatcccacctaaagcagagtttaccctcattaccaccacaactacaaacccaaattgctaaatctttagaattacctagacatcttagaatggcgactcttgaagctagaaattatatagacgaatattcacaagaaagtaatcattctttggcattgcttgaacttgcagaattagaattttctgaattgcagtctcttcatagaaaggaattggctgaaattatcatctggtggaagcaattaggacttgtagagaaattgggctttgcacgtgaccgtccatttgaatgtttcctctggactgttggtgtctttccagaagcttcatattctaatataaggattgagttagccaaaaccgtttgtattttgttagtacttgatgacatttatgacacatatggtagtctggatgagttgatcttattcaatgacgctattaagagatgggaactgagcgcaatggagcaattacctgcttatatgaagatatgctatatggcattgtacaatacaacaaatgaaatagcttatagagtacttaaagaacatggatggtgtatttctgcacatttgaaacgaacctggattgatatcttcgaggcatttcttacagaagccgagtggtgtaatagaagatatactcctacgcttgaacagtatctgaccaatggtgtaacttccgggggatcttacatggccttggtgcatagcttcttcttaattggtcatgatgtcacagatgaaactgtttcaatgatggagccttatcctgaattattctcatgttctggtaaaattttaagactttgggatgaccttggaacggctaaagaggaacaagaaagaggcgatgtagcaagttcgatggagtgttacatgaaagaaaataatgttgagttagaagatgaggctcgtaagcatattaagaagatgataggtaacttgtggatggaacttaacgaacatctaatggccccatcagctttacctcgatcaatcactaaggcctgttttaacctagcaaggacagctcaaattatttaccaacacggagatgacgaaaccttttttagtgtcgaagatcacgtgcaaagcctttttttcacaccttgcaaa

SEQ ID NO: 1009 - DNA, 1569 bp, Vitis vinifera
atgtctgaggctgactcttctactcgtagaatgaaggaagttaaagagagaactcgtgaagctttttatagggcttgggatagcagggccgctatggaaatggtggatactgtggaacgattgggcttaagctatcatttcgaagatgagattaaggctcttttgcaaagattctgtgattggaactcttcggaggatttattcactacatctttgcgctttagacttttgagacagaacggttttccaacccacagcgacgttttcggtaagttcatggacaaaaatgggaagtttaaggaatcgttgaccgaagatatttggggtatgttgtcgttacacgaagcaagtcacttaggcgcgaagaatgaagaagtgttagctgaagccaaagaatttacgagaattcacctcatacaatcgatgccgcacatggagccacacttctcgtcacacgttggaagagcactagaattaccccgtcatttgagaatggcgagattagaagtcagaaattacatcggtgagtattcgagagaatccaatcctaacctggctttgcttgagttggctaagctggattttgatatggtgcaatctttgcatcaaaaagaacttgcagaaattgtccggtggtggaaacaattgggccttgttgataaattagattttgcaagagatcgacctatggaatgtttcctgtggaccgtcggtatcttcccagacccacggcatagttcgtgcagaatagaactaacgaaagcgatcgcaattctattagttattgatgatatttatgatagttacggtagtttggacgaacttgcgttatttacagacgctgtgaaacgttgggatctcggtgcaatggatcaactaccagaatatatgaagatatgttacatggcgctgtacaacacgactaacgatatagcttatagaattcttaaggagcacagatggagtgtaattgaagacttgaaaaggacttggatggacatattcggggccttcttagccgaagcgcattgctttaagggtggtcatgttcctagcctagaggaatatctaaacaacgcagttacaaccgggggcacttacatggcgctagtccatgcatttttcttgatgggtcagggtgttacaagagagaacatggctatgttgaagccttatcccaacattttttcttgttctgggaaaatcttaaggctatgggatgacctagggactgcaagggaagaacaagagagaggtgataatgcttcgagcatagagtgctacaaacgtgagcgtgagagggaaatggatactgttttggatgatgaagcttgcaggaaacacatcagacaaatgatacagtctctatgggttgagctaaatggcgagttagtcgcgagttctgctttaccattgtcaataatcaaagcagctttcaatcttagtagaaccgcccaggttatttaccagcacggtgatgacaataaaacgtcttctgttgaagaccatgtccaagctcttttgtttagaccagtatcctccaatggacatgcccagattactatgcat

SEQ ID NO: 1010 - DNA, 1659 bp, Sesamum indicum
atgtgtatgtcaagttctagctcctcttcaatgccaatgtctgttcccacagctgctccaatgatcacggctaacggtgctttactcaaatacataaggcaaccaacattgtttcctgtcgagcaagatgagggttccaaaaggagagattacctattaggaaaggttggtatgcaactgcagtctgcagcagccgctgtcgaaaagctcaaactaatagacacaattcaaaggttaggaattgcgtattatctagaagatggtataaatgcgatcctacaggctgaatttagtaatgcgttgagtacagatgatgatctttttactacagctttgagattcagattgttacgtcataacggctttcaaatttccccagacgtcttcttaaaatttatggataaaaatggtcaattcaaagagtctctgaccgacgataaattaggcttgttatctttatacgaagcttcatatctaggttccaatggtgaagaaatccttgaaaaggccatggaactaactaaaacacatttacagcgatcgctgccacagcttcctcctcaattgcagggtcaagttgctcaggctctagaactgccaaggcatttaagaatggctcggcttgaagctaggaggtatattgatcaatatgccgcacagtcagactgtgatcaggaactacttgaacttgctattctcgattacaacaaagttcaagcccaacatcaaatggagctggcggaaatcacaaggtggtggacccaattaggcttggtggacaagttaactttcgctcgcgatagacccctagaatgctttctttggagtgtaggtttattaccagaacctaagtattcgacttgcaggatagagctggcgaaaacaattgctatactgcttgtaattgatgacatatttgacacctatggaaagatggacgagttattactttttactgatgctattagacgatgggatttggaagctatggaaacacttccagaatatatgaaaatttgttatatggcactgtacaacactactaatgaaatctgttataaagtccttaaagaaaatggttggtctgttttaccatacctcaagtctacatggattgatatgattgagggatttatggtggaagcaaaatggttcaacggcggtagcgcaccaaatctggaagaatacattgaaaatggtgtgtcgaccgccggagcatatatggctttggtccacttgttcttcttgatcggtgaaggtgttactgaccacaatgccagactcctatttaaaccatacccaaaattgttttcagcggctggtagaattttgcgtctatgggacgatttaggtactgctaaagaagaggaagagagaggtgacttggcttcatctattcatttgctcatgagagagaaaaagttagccaccgaggaagaagggagatcgcgcatcctagaggatatctatggtttgtggaaagacctaaacggggaattgatagcaaaaaatggtatgccactagcgataattaaggttgctttaaacatggcgagggcctctcaagtagtttacaaacacgatgaagatacctatttctcatcagttgacaattatgtagaagcccttttctttacaccattatcatttacatacaat

SEQ ID NO: 1011 - DNA, 1587 bp, Jatropha curcas
atgtgccaatctcaaactcaatatagaaccacagccagatgtcaattatctgttattccacaatatcctgctccagaattgttgctcgcgaaccgttgcccgaaatccttagaggagctccaagaagctacaaggaaagagctgctgacgacagggaatccaactgcttctatgaaactaatcgattctattcaaagactaggtattggctaccatttcgaagaagaaatcagtatgttgctagaaagaattttagaatggaatattaacggtcacgacttattaacatcagctctgagatttagattattgaggcataatggtttaccagtgtacagtgatgttttcaggaaatttatgaacaaaaacggaaaatttaaagaatctttgagtaaggatactatgggtttattatccttacacgaagcttcatacttaggctcaaaagacgaagctgaattggtgcacgcaatggagttcacgagaaattatctccaaggttacatcgcccaaaataagaaaattggtcaagcactagagttgccccgtcacctacgtatgaccagattggaagcccgtaactatatagatgaatactctttacagaccaaccattcgcaaacattgtttcaactagccaaacttgattataatgcagttcaaagcttgcatcagaaggaattagtagaaattgtacgttggtggaaagaactggggctcgtggaaaagttgggatttgcaagagatagacccctcgaatgctatttatggacagttggtatctttcctcaaccttacgactcaaacagcagaatacaactgactaaaactgtggccattttgctagttatcgacgatatatttgacacttacggctcattttccgacttaattttgttcactgacgcagtcagaaggtgggacctgtccgctattgaatctctgccagaatacatgaaaatatgttatatggctttgtataatacaaccaatgacattgcatatatggtattaaaacagaatggttggtcgatcgtgccacaccttaagagaacctggattgacatgttcgaggcatttttgacagaagccaagtggtttaaaaacggttatgttccaactctagaagagtatttagtaaatggcgttactactggtggcacatatatggcgttggtgcatagtttttttctgctgggtcaaggtgttactaaagagaccattactatgcttgaaccttacccagatctattcacgagtgctgggaaaatactgcgcttgtgggatgatcttggcactagtagagaagagcaggaacgtggcgatgtcgcaagtagcatagaatgcttcatgaaggagaaggcaataagctgtgaaggtgaaggaagaaaggaagttagacaattaataagaaacctatgggtcgagctaaatggtgaattgatagcacctagtagaatgccactatctacaattaacgcctcctttaacctcgctaggaccgcccagattgtctatcaacatggggatgacatgaaaggcttgtctgttgatgaccaggtccaagctttgttatatcaaccaatt

SEQ ID NO: 1012 - DNA, 1674 bp, Erythranthe guttata
atgggttctaactaccgtgctagaaatttgtgtatctgtatgtctttactgtctcccttaaccattaccggtaactacgataacgcattgctcaagtacataaggcaacctatggtcttaatccctacacaagaggacgaagggactaaaaggagagaatatctactggaaaggacagcacgagaactacaggaatcgactactgtggagaaattgaagttaatagacactatccaacgtttgggcataggatattatttcgaagaagatataaacgcaatccttttagtcgagttttccaacgcacttatcacagaagataacttattcacgacagccctcagatttcgattacttagacataacggttttcaaattacctcggacgtatttcttaaattcatggatgaaaatcgtaaatttgaagaatcgctagccgatgatacactgggattgttgtctctatacgaagcttcatatatgggcgcgaatggtgaagagatcttggaggaggccacgaaatttacaaaggcctacttgcaactttcgataaggcaactctctccacctcatcatcacgatcagttagttatcgaggcattgaagttacccagacatatgagaatggcgagattagaaacccgtcaatacatagaaaaatatggggctcagtctgattgtgatgcagcattgttagaattggcaactctagactacaataaggttcagacccaacaccagattgaattagcggaaattacgagatggtggagacagcttggtttagtgaagaagcttacttttgccagggatagacctctcgagtgctttctttggacggtgggtcttctgcctgaacccaaatactccacatgtagaatcgaattagctaaaacaatagctatattgttggtcattgatgatatatttgatacatatggcaagatggacgaacttgtcatttttacagacgcgatacgacgatgggatttagaagcaatcgagaccctccctaaatacatgaaaatttgctatttagccctatataataccacaaatgaaatctgttataacgtattgaaggagaatggatggactgttttaccttaccttaaatctacttggattgatatgattgaaggttttatggtagaggcaacttggtttaacggcggtagtgaacctaatcttgaagaatacatagagaatggggtgagtactgcgggagcttatatggcctttgtgcatctgttttttttgattggagagggggttactcgtgagaattctgaattgttactgaataagccatatccaaatatcttttcgtttgccggcagaattctaagactatgggatgacctcggcacaagtaaagaagaggaagaaaggggtgacatggcatcctcgattaggctgttcatgagagaaaaaaacattgagagagaagaagaaggaagaaaaagagttttggaagaaatttatggtctgtggaaggatttaaatggtgagatgatgtgtgaaaatcgagtgatgcctttagctatcatagacgtagccttaaatatggccagagcctcgcaagtggtatacaaccacgaagaggattcatatttcagtaatgtagacaattacgttgaagcactgttctttactcctattgcctcatattta

SEQ ID NO: 1013 - DNA, 1545 bp, Vigna radiata
atgactatgacttctttcgaacagttgaagatcaagtctcaggaagttttactcgattcctctgattcactaaggaccttgaaacttattgatacgattcagcgattaggaatcgaccatcatttcgaagaagaaatcaacttgcaattaggaagattaggtgattgtaacaacgctcaagacctatttgctacagcattacaatttcgactattgaggcacaacggttgttcgacaagtagcgacgtttttaataagtttctagataagtccggtaatttcaaagaatccgccacaagagacgtatggggaatgctgtctttacacgaggcgtcatacttaggagcaaagggtgaagaagtactgcaacatgcaatggaatgctcacgggcccatctgcatcaatcattgcctcatttatctccagaagtgggaagagtagtagtcgaagcgttaaaatatcccaggcatcagaggatggctagattagaagcgaaaaactatatggttcaatacagtaaagagtcaaatcaaattccggcattattagagcttgccaggttagattacgacatggttcaaagtatgcatcaaaaagaactagcagaaatctctaggtggtggaaagatcttggattgatagagcgcttaggctttggacgagatggtcctagagaatgtttcctatggtctttgggtgtttttccagaaccccgtcatagtaactgtcgaattgagttggcaaaagccatttgcatcctgcaggttattgatgacatgttcgatacctatggtacacttgatgagctcatcctctttacagaggcagtacaaagatgggacttagacgcaatggaaaagttaccagaatatatgaagatctgttatatggctctttataacactacacatgatatagcttaccgaatccagcgcgaccatggacaaactgtcgtagcatctctaaaaaggacttggattgatctgctcgaagcatacttgaaagaagccaaatggttcaacaataagtacgtgccaactttcaaagaatacttggacaatggcgttatatcaagtggatcctgtcttgctctggtacatgctacggtgctgataggtgagaatttgtcaagagaaacaatatctttgatgtctccataccctagacttttcacatgttcaggtgaaattttgagattatgggatgatctcggtacctctaaggaagaacaagaaagaggagacaacgcctgcagtatacaatgcatcatgaaagagaatgatatactagatgaatctttcgcgagaaaacgtattagacaacttttgggtaatttatggcctgagcttaatggtttggcaatggccaatacaacgttgccatcagcagtgactaaggcttctttcaatatggctcgcacgtcacaatttatttaccagcatggagatgatcaacaaatgccaaccgtagatgatttggttcaggccctattgttcacaagttctgagaaatatagagaagaaacagatattaactttgttgtt

SEQ ID NO: 1014 - DNA, 1557 bp, Vigna radiata
atgagtgtagcatttcgtgataaagtcccaatacaaatagacccaggcaagaagaaactagaacaagtaaagagatcttcgcaagaaactctgttgaactcatctgatccaactaagactttaaagattattgatataatccaaagactaggtattggccaccattttgaagaggaaattaacgttaacctcggaaaagttagagatttcgacttttcccaagacctgtgttcaactgcattacaatttagattgttgaggcacaatggttgtcacgcctcttcggatgttttcaagaaattcctcgatcatagcggaaacttcaaagaaagtatcacaagcgatatttggggtatgttgtcaatgtatgaggcttcttatttaggggctaagggcgaggaggtactacaacaagcaatggacttctcatcagcacacctccagcagtcattgccacttctctcaccagacgtaggaaaccatgtcgtccgtgctttaacgctaccaagacacttgagaatgagccgcctggaagctaggaattatattgaggaatactcacatgtatctagtaagatgccttgcctattggaaatggcgaaaatcgataacgcaatggttcaaagcatgcatcaaaaggaattagcggacatctctagatggtggaaagatttaggtttagtcgagagcttgggttttgcaagagataagccaggagagtgctttctgtggaccgtgggtgtttttcccgaaccttgttattcaaattgtagggtggaactcgctaagactatatgtattcttcttgttatggatgatattttcgacacctatggtacactcgatgagttagtattgtttactgaagctataaaaagatgggatttggacgccatggaacaattgccagagtacatgaagattagctacctggcattatacaacacaacccaagagatagcctgcaggatacaaatggaacatggacaaaccgttctctcttgtttgaagaggacatggatggacattttcgaagcgtttttaaaagaagctaaatggttttcaaataaatacgtccctacttttcaagagtatttggctaatggtgttatatctagtggtagctatatggcccttgttcatgcaacatttctaattggagatggaatttctaaggaaaccatctcgatgatgaacccctacccaagactcttctcatgtagcggtgagattttaagactctgggatgacttaggtacatccagagaagagcaggaaagaggggataatgcttgtagcctacagtgcttgatgacagaaaacaacatttctgatgagaatgttgcaagaaaggaaattagagggttcatcagaaacctctggcctgagctaaattcattggccttgactacgactagcttgcctttttctgtcataaaggctagtctgaatatggcgcgtacgtcacaagtaatttatcaaaatggcgatgaccaaaacacgttcacagtggatgattatgtccaaactttacttttcactccagctcaaaactct

SEQ ID NO: 1015 - DNA, 1551 bp, Arachis duranensis
atgcttagggaaaaggtggaatgtctagagagcaacgaccgaaagaagtccctggagcaggtaaaaaaggaaggtcaagaggcactacttaaaaagtcttctgatcctgttggtaccatgaaaattatagattcaatccaggagttgggcataggtcaccacttcgaagaagaaataaatgctttactgggtaaaatttgccattgggatgctagtcaagatctgttcgcaacaagcttacaattcagattacttaggcataatggctggactacatttcctgaaaactttaacaaattcttagataagtcaggcaactttaaagaatccttgagtcgtgacataggaggagttctttccttatacgaagcctcttttttaggcgccgaaggcgaaggcgttctgcaacaagctatggatttcagtcgcggacatttacatcaatctattccacatatggcgccagaattgggtaggcaggtttcaagagcgctaagattaccaagacatttacaaatggaacgtctcgaagccaaaaattacatggaccaatactcgaggactacaacgaaaatacccgccctgttagaactggctaagttggattatgatatgttgcaatctctatataagagagaacttggggagattacgcgttggtggaaagagttaggactaattgagagtttgggctttgcaagggatagacctagtgaatgctttttgtggactgtgggtatttttcctgaacctaggtattctaattgtaggatcgaacttacgaagacagtctgtattctgttggttatggatgatatatttgatacatacggtagcttcgatgatttggtattatttgtgaaggcgataaagaggtgggatttggacgcaatggaacagctgccagagtacatgaaaatctgctatatggccctgtacaacacaacacatgaaatcgcctataaaattcagaaggagaggggtttgactgctgttgcttacttaaaaaaaacatggatcgatatctttgaagcctttttggaagaagctaaatggtttaaccagggttacgtaccctcttttagagaatatttggataatggtgtgatcagcgcgggttcctacatggccatgacacatgctacttttctcgttggggacggaatctctaaggacacattaagtctgatgaaaacttatccacgattattctcgtgctcaggtgagattttacgcttttgggacgatttaggaaccagtacggaagaacaagaaagaggcgacaatgcatgctctattcaatgctacatgcgggagaacaatggttgtgacgaaaatgaagccagaaagcatatcaggggattaattggtaagttatggcttgagcttaacggtgtcgccatgaacaccactgctttgccttcttcgattgtcaaagcgtgttttaacatggctaggactgctcaagttatctatcaacatggggatgacaaatcgacatacacagtggatgattatgtgcaaaccttattttttaccccgtcagccata

SEQ ID NO: 1016 - DNA, 1587 bp, Vigna angularis
atggcaatgaaacaaaataagctctctataaagagtgtggcattcagagacaaagtaccaattcagatagaccctggtaagaagaagttggaacaggttaagcgtagcagccaggaaacgctattgaacagttctgaccccacaaagacgttgaaaataattgacaatattcagagattaggtattgggcaccactttgaagaggaaattaacgtgaagttgggcaaggttgctgattgtgatttctctcaggatttatgctcaactgcactacaattcaggttattgaggcacaatggttgtcacgcgagctccgatgtatttaagaaattccttgatcactccggtaactttaaagagagtataaccaccgacatctggggaatgctatcgatgtacgaagccagctatttaggcgcaaaaggtgaagaggtgctacaacaggctatggacttctcttctgctcacctacaacaatctttacctctactcagtcctgacgttggcaatcacgttgtcagagcattgactctgcctcggcatttacgcatgtccagattagaagcaagaaattacatagaagaatactcccaagtaagctctaagatgccatatctcttagaaatggctaagatagataacgctatggttcaatctatgcaccaaaaggaattggcggatataagccgctggtggaaggacctagggttggtggaacgtttagggttcgcaagagacaaacctgcggaatgtttcctatggaccgttggcgtatttcccgagccttgctacagcaattgcagaattgaattggccaagaccatttgcattctcctagttatggacgatatttttgatacctacggtacatccgacgagttagtactatttaccgaagcaatcaagagatgggatcttgatgccatggaacagttgccagagtacatgaaaatttcttatctggccttgtacaatactatccaagaaatagcatgcagaattcaaatggagcacggtcaaacagttctttcatgtttgaagagaacctggatagatatctttgaagcttttctaaaagaagcaaaatggttttccaacaaatatgtcccaacttttgaagaatacttagctaacggcgtaatctcctctggttcatatatggccttagtacatgcgacgttcttgattggcgacggtatttcgaaggaaacaatatccttaatgaatccatacccacgtctgttttcatgttcgggtgaaattttaagattgtgggacgatttgggcacgagtcgagaagaacaagaaagaggtgataacgcatgttcactccaatgtttaatgactgaaaataacatttcagacgaaattgtcgcaaggaaacaaattcgtgggtttatcagaaatttatggccagaactaaatagtttggcattgacaactgcatctttgccttttagtgtcatcaaggccagcttgaacatggctaggaccagccaagtaatttaccaaaatggtgacgatcaaaatacttttactgttgacgattatgtacagacgttgttgttcacacctgcattagagtat

SEQ ID NO: 1017 - DNA, 1278 bp, Vigna angularis
atgacgcaaacgataccaactatgacaagtttggaacaattgaagataaagtcacaagaagtactacttgatagctctgattctttgagaaccttaaaattaattgatacaattcagagattaggtatagatcaccactttgaagaagagattaatctacaacttggaagagttgcagattgtaataatgcgcaagatttatttgcaactgcactgcaatttagattgttgaggcacaacggatggtcgacatcatccgatgtttttaataaattccttgacaagtctggtaactttaaagagagtgtgaccggtgatgtatggggtatgttatctcttcacgaggcttcttatcttggtgcagaaggtgaagaggttttgcaacatgccatggaatgttctagagcccatttgcaccagtctttacctcacctgagccctgaagttggaagagtggtggtggaagcattaaagctaccccgtcaccaacggatggttagattggaagcaaaaaactacatggtacaatatagtaaggaatcgtctcaaatccctgcattattagaactggccagactagattacgacatggtccaatctatgcatcagaaggaacttgctgaaatctctagatggtggaaagacttaggactaattgaaaggctgggcttcggtcgggatggcccaagagaatgctttctttgggcattaggggttttcccggagccgcgtcactcgaattgcagaatcgagttggcaaaagctatatgtattttgcaagtgattgatgatatgttcgatacatatggtacattggacgaattgatattgttcaccgaggccgttcaacgctgggatttagatgcaatggaaaagttgccagagtatatgaagatatgctatatggctttatataacacaacccacgaaattgcttacagaattcaaagggatcatggccagactgttgttgcgtctttgaaacgtacttggattgacttgttagaggcctacttgaaagaagcaaaatggtttaacgataagtatgtgccagcttttgaagaatacctagataatggagtgattagctcaggatcttgtttggctctggtccatgccacagttcttatcggagaaaacttgtctagggaaacaatttcacttatgagtccctatcctagattattcacctgctccggcgaaatcctgcgtttgtgggacgatttaggtacatcaaaagaagaacaagagagaggagataatgcttgctcaatccaa

SEQ ID NO: 1018 - DNA, 1515 bp, Lupinus angustifolius
atgtgctctacgaagtccttggagcaggtaaagagaaaaatacaagaaacgctactaaattccgataggttagggactctcaaaataatcgactctatccaacacttgggtattggtcatcatttcgaagaagagatcaacgcattgttgggtagagtgttagactacgatacagctcacgatttattcgcaactagcctgcattttcgcttgttgcgtcacaatgggtttcccacaagtagtgatatcttcaaaaaattctgtgataaatctggttattttaaggaaagcctatcgaaagacatttggggtatgttaagcctttatgaggcctcctacttaggtgctgaaggggaagagctgttgcacaaagccatggatttttcgaaggtccatttacataactctatttcacagctaggtccccaagtttcaatgcatattgctagaagtttgattctacccagacacctcaagatggcaaaactggaggcaaaaaattacattcacgaatactcccacgcgtcgaatcaaatacccgctcttctcgaattggctaagttagactacgatatggctcaatcactacaccaaagagaattggccgaaatatgtagatggtggaaggaactaggactggtcggtagattgggatttggtagagacaggcccgctgaatgttttctgtggactttgggtatatttccagaaccaagctattctaactgtaggattgaattgacaaagacgatttgtatattattggttatggacgatattttcgacacgtatggctctctagacgacctaattttatttactgacgcaattagaagatgggatccagacgctatggtccaattacctgagtacatgaaaatctgttatatggcgttatacaacactacacatgaaatcgcgtttaggattcaaaaagaacacggtgtaaccgtagtggcccatttgaaaaggacttggattgacatctttgaagcttttttagaagaagcaaaatggttcaacaaggggtacatgcctacattcagggaatatttaaataacggtgttatctccgcgggttcatatatggcaatggtgcatgccactttcttaattggtgatggtaactccaaggagaatatttccatgatgaaaccatacccgcgtcttttttcgtgttcaggcgaaatcctccgtctatgggatgacctgggtactagtacagaggagcaggaacgtggtgataatgcttgttccattcagtgtcacatgcgcgaaaacaacatttcggatgaaaacgaagccagaaaacatattcgggaattcattggtaaactgtggcaagaattaaatggtatcgctatgaacacaaatttgccatggagtattgttaaagcatcactcaatatggctagaacagcccaagtgatttatcaacatggtgacgataagtctacctatagtgttgacgaatatgtacagaccctgcttttcacaccatcaccacgtaattct

SEQ ID NO: 1019 - DNA, 1485 bp, Cajanus cajan
atgtcgtcgcaagaagctttactaaatacctcggattccctgaggacattgaaaacaatagacacaattcaaaggctaggcattgagcatcattttaaggaagaaattaatctacaattgggtaggttaaccaactgggaacctgttgaaaatttattcgccaccgccttgcaattccgattgttgcggcataacgggtggcctacaaggtcggacgtattcaataaattcttggataaatcaggcaattttaaggagagcgttacaaaggatatttggggaatgttaagtttatatgaaagctcttatttgggaaccaaggacgaggaagtgttgcagcaagcaatggacttctctagagcacacctacacagatctttaccttatttgtcgttagaagtgaagaatattgtaggtggtgctttaatgttacctagacatttaagaatggcacgtttagaagctaaaaactatatggttgaatgtagaaaaacctcttcacagataccagatctactaaaactggctaggctggattttgatatatcccaatcaatgcaccaaaaggaattggccgaaatctcaagatggtggaagaatctaggtttggtagaatctataggttttgggagagataagccaggtgaatgttttctctgggtattaggtatacttccagaaccctgctatagcaactgtcggattgaattggctaaagcaattagcgttctgcaagtcatggacgatatgttcgatactcatggtaagctggacgaactagttccttttacaatggcaattcgtaggtgggacctggatgcaatggaacaattgcctgagtatatgaaaatctgctatatggcattatacaataccatacatgagatcgcgtatagaatacagaaagagcatggtaagaccgttattacatgtatcaaacgaacttggatcgacatattcgaagcctatcttaaagaagctaaatggttcaataacaagtatgttccgacgttccgggagtatttggataacggcgtgatatcttcagcaagctttatggctctagtacatagtactttattgatcggtgataacttgtccgaaaaaacaatcagtatgatgatcccataccccagaattttttcgtgctctggagaaatcctacgactatgggatgatttagggacgtcgcgcgatgaacagaagagaggagataatgcttgctcaattcaatgtcttatggcagaaaataatatttcagatgaaaatgtcgcccgtaaacatattaggaaattaatagggaacctgtggttagagctaaatggtttggcattaactactaccgattttccgctatcagttgccaggactagtttaaatatggctagagcagctcaagcaatttatcaacatggcgatgaccaatcaagcttgacggtcgacgaccaagtccaggcattgttattcaccccatcagcaaattat

SEQ ID NO: 1020 - DNA, 1629 bp, Cajanus cajan
atgtcatccatgtttcaaccccggaatttgtccctgaagacaagtagaccgccaatgatttacaataaccttagcatcaagtccatagcgttcagggataaggtactattatttcaaactgacccatctacaagaaacctggaacaagtaaaacggcgttctcaggagctactgttgaacagccgtgatcccataaaaactttaaagattattgataacattcagcgattaggaattggccatcacttcgaagaagagattaacgtacagttgggcagagttggtgactgggatgtaactcaggaccttcttgctaccgcattacaatttagactattaagacataatggttggcctgcgagatcagatgctttcaaaaaatttctagacaataccggaaattttcaggaaagcattacaaatgacatccgggctatgttgtccctttacgaagcttcttacttgggagctaaaggtgaagaaatccttcaacaagcaatggatttctctacggcacaccttcatcagtcattgcctcatttatcacctgaattgggacgtatcgttgctagatcactcacccttccccgtcacttgagaatggccagacttgaagccaaaaattatatggaagaatatagccaagcctcatcgcaaataccatctttgttggaattagcaaaactagatcatgtaatggtgcaaatgatgcaccaaaaggaattagcggagatttcaggttggtggaagaaactgggcctagtcgaaagattgggctttgcaagggatagaccagaagaatgttttctatggacagtgggagtcttccctgagccatattatagcacttgtagaatcgaattgactaagactatctgcattttacttgtaatggacgacatcttcgatacctacggtaccctagacgaattaattttatttacaaaggctataaaacgttgggatctagatgcaatggagcaactaccagaatatatgaagatatgttacattgctctgtataataccacacacgagatcgcaaacaagatagaaaaagcacatggtgagtcagtcgtagcttgcttaaagaggacttggacagatattttcgaagcctttcttaaagaggctaagtggttcaacaacaaatatatccccacttttagggagtatctagataatggcgttatttcatcaggctcttatatggctatggttcatgctacattcttagtcggagatggattaagcaaagaaacaatttcaatgatgaagccttatcccagacttttcagttgtagcggtgaaatattgagactatgggacgatctgggtacttctcgagaagaacaagaaaggggcgataacgcgtgttctatccaatgttttatgacggaaaataacataagcgacgaaaacgtggcgcgtaagcatattcgcgaattaattagaaacctatggccagaattaaatggtttggcaatgactacctcggctttgccactgtccgttatgaaagctagtttgaatatggcaagaaccgctcaagttatttatcaacatggagacgagcaaaatgcttttacagtcgatgattatgtaaagactttactgtttactcaacat

SEQ ID NO: 1021 - DNA, 1509 bp, Manihot esculenta
atggcaaaccccacagcaagccttaagttgatagattctattcaacgtctgggtttagggtaccatttcgaagaagagatctcaatgcttcttgaaagatttgttgattggaatccggacgaccaggatttattggccactgctcttcgatttagattgttaagacataacggtttccctgcatcatctgatgtgttctcggagttcaagggaagggatggtaagttcaagcaatctttgtccaaagacccacttggtctgttgtcgctatacgaagctagctacttaggcacaaaggaagaagaggaactggtgcaagcaatggaatttacgagaacacacttacaaaaacgatcgttctctttgttaccttcacaacatcgtaggcaagtcgttcaggcattagaggttccgagacatctgagaatgtcacgtttggaggctagaaattacatcgacgaatactcccgggaatccaatcatagccccgatctattggatctggctaagttggattttaatgcggttcagcagttgcatcaaaaagagttagttgagatcatcaggtggtggaaacagttaggccttgtcgagaagctaggcttcgctagagatcgcccattagagtgttacttatggacagttggcattttccctgaaccatataattccaattgtcgtatcgagcttaccaaaacaatagctattctgctggttatagatgacatatttgatacttatgggtcgttgcccgatttggtgctttttactgaggctacgagaagatgggatttatcagctatggaatcactgccagaatacatgaaaatatgctatatggctttgtacaatactaccaacgatattgcgtatatggtcctcaagcaacatggatggtcgattgtacctcaccttaaaagaacctggatagacatgtttgaggcatttttagcagaagccaagtggtttaataaagaatacgtacccagtttggaagaatacttggttaacggtgtcacgacaggcggtacgtatatggctttggtgcacagcttcttcctgatgggtcaaggagttaacaagcaaaccttagctctaatggaaccataccctgacttgtttacattttcagggaaaattctaaggctgtgggacgacctaggtacagcgcgggaagaacaggaaaggggcgacgttgcctcatctattgagtgtttcatgagggaatcccggatctctggtgaagatgaagcgagaaagcagatacgtgaacttatccgctctttatggatcgaattgaacggtgagttggtagcgccgtcttctatgcccttgtgtattgtaaatgcgtcctttaacttggccagaacggcacaagttgtgtatcagcatggagatgataaaaaaggttcttctgtagatgatcaagtgcaagcattgatatataagccaatccctttagatgacgaagcaaaggtagtacatgatttagagaccatggttgtcatt

SEQ ID NO: 1022 - DNA, 1512 bp, Hevea brasiliensis
atggagcgtacccgtaaggaattattaacacctgccaatccctctgcttccttgaagtttatcgatagcatacaacggctgggtattggttatcactttgaagaagaaattaacatgttgttggaacgttgtgtggattggaatgcaggtcaagatttgttggcgacagcactgaggtttcgcttactacgccacaacggtttcccagcatgttccgatgtctttaataagtttaaagataaagacggcaaatttaatcagagtttgtcaaaggatccactcggattgctctctttgtatgaggcaagctacttgggtactgaagaggaagttgaattagtgcaagctatggaatttacaagaactcatcttcagaagatttcaatacccttattctccccgcaagatagatgccaagtttttcaggccttagagataccacgtcaccttagaatgtcaaggttggaaacaagaaactacataaacgaatatagcatggaatccaaccgaaaaccgactctattagatcttgcaaaacttgattttaatgcagtgcaattagtacaccaaaaagaattagtggagattataagatggtggaaacagctaggattggtggagaaattgggtttcgcacgcgatagacctcttgagtgctatctgtggactttaggtatatttcctgaaccctacaactctaactgtagaatcgaactaactaagacaatagcaatcttgctagttattgacgacattttcgatacttacgggttattacctgatctggtgctcttcacagaagctattagaagatgggacttatcagcaatggaaccgctacctgagtacatgaagatatgttacatggctctatacaacacaaccaacgatatagcatatatggttttgaaacaacacggatggtccatcgtaccacatcttaaacgtacctggatagatatgttcgaagcctttcttgctgaggccaaatggttcaataacgagtacgtcccatcgctagaagaatatttggttaacggcgtaactactggtggaacatatatggctttagtccatgcattttttttgatgggtcaaggtgtcacaaagcaaacagtcgcaatgatggaaccatatccagacttgttttcgttcgcagggaaaattttaagactatgggatgatttgggtacggctagggaggaacaagaacgtggcgacgtcgctagttctattcaatgcttcatgagagagaagggaatatcgtgcgaagacgaaggaaggaaacaggtgaggcaattgattcgaagcttatggattgacctaaatggggaattagtggcgccaagtagtatgcccttgagtattatcaacgctagttttaacctagcacgaactgcacaagttgtctatcagcatggcgacgacaagaagggatcatccgtcgatgaccaggttcaggcccttatatataaaccgattagtttaggtgatatgaaacaagactgtgtt

SEQ ID NO: 1023 - DNA, 1599 bp, Helianthus annuus
atggcgacaattgctatttctacaactcagggaaacgacttccttcttgttaagccgcaattggtgataagctcggagggagacgttagaaagaggatccataacttaaaggaaaacacgcgtagagcactaatgaccgcctcgaatcccgctatgaaattaaaattagtggatatgattcagagactgggattagggtacatatttgaagaagatattaaaataatgctggaaacattagcacacggacaaccggatgatgacttgtatactgtcgcattacgcttcaggatacttaggcataatggtttacacccgaacccagatgtattcggtgcattcatggatgcaaatggcaaatttggagagtctctagttgaggacacggaaggacttctcagtctttatgaggcctcttatttaggtgctaacggagaagatatcctttctcaggcgaaggagtttacaacaacgcatctaaaaaaatccgtttctaggtttacacataagctaggagagcagatccttgaatcttttgagattcctagacatttaagaatggtgagattagaagctcgacgttatattgaagaatatggcaaagacattgatcacactccagtgtttctgcaacttgctaaacttgaatataatcaagtacaatcgctacatcaaatggagctcgcagagttgagcaggtggtggagagacctaggcttagcatccaagttaacatttgctagagaccgcccaattgagtgtttcttgtggtcggttgggcttttgccggaacctaaatattctacggtacggatagaattagcaaagacagtgtcaattttattagtaattgatgatgtcttcgatacatacggcacttacgatgatctggttttgttcactaaggcaattcagagatgggatgtcgatgagatcgaacaacttcctgagtatatgaagatatgctacatggcactacataacactacaaacgaaatttgtgatgttgtacataagaatcatggcctatctgttttgccttatcttcgtaaagcttggatcgatacaatccaagcctttatggttgaggcagaatgggtgaaaagaggatatgagcccgatttaaaagattatatcgataatggaattactaccgcagggacgtatatggcccttgtccatttgttctttttaatgggagagggggtaactcctaagaacatgagttcacttttacattcttatccaccattttttactcatgctggcaagattctgagactttgggatgatttaggtacgtcaaaagaagaacaggaaaggggtgatattgccagttcggttcagttattaatgaaagagaaaaatataaaatctgaagaagatggtaggaaacagattttagaattaatccaaacatcttggaaagagctaaatgaggctttggttgctcccaacatatttccgttctccattgtcaacgttgctcttaacatgagtagagcgagccaagttgtttatcaacacgatgacgggaattcttatttttctagcgtagacgaccatgccagaagcctattttttaccccaattgatatg

SEQ ID NO: 1024 - DNA, 1578 bp, Olea europaea
atggcggaaaatggagctatgtataactacatcagacagccagtcattgtcacaccagaagtagatgatggtactaaacattctgaattagtcgaaaggaccagaagagaattacaaagatctaccaagccggttgaaactctaaaacttattgacaacttgcaacgtctcggtattgcgtattattttgaagacgatattaatgctattttagatcaattttctgacggtttgccagacgaggaccttttcactacagcgttatgctttcgtttacttagagattcaggttataaaacaggctctgacgtttttttaaaatttatggaaaaaaatatgaagtttaaagatcatttggcccaagatacaataggattattgtctctttatgaggcttcgagtatgggagcgaacggtgaagagatcttaagcgaagctaaagagttcaccgaaatacacctgaggcaatctatgccaagactagttccacaattaagaagacaagtttcgtcagctttggaattaccacgtcatctcagaatggctagattggaagccaggcgttacattgaagagtacggcaatgagagcgaccacgatcccgcagtcctcgaattggcccggctagattataataaagtacagttgcaacaccaaatggaattagctgaaatcaccaggtggtggaagcagcttggcttagttgagaagctatcttttgcgcgtgatcgaccactggaatgtttcctgtggactgttggtttacttccagaacctaaatattcttcgtgtagaatagaattagcaaaaacaatagccatcttattagtaatcgatgatatcttcgatacatatggaaaaatggaggaactggtgctcttcaccgaagcaatacaaagatgggacttagatgaattagagacgctacctccctatatgaggatttgctacatggcactttataacaccacaaatgagatatgttacaagatcctcaaggagtatggtttctgtgttctcccctatttaaaatcaacttggattgatatgatagaagggtttatggtcgaagctaactggtttaatggtgggcacggacctaacctggaagaatatatagagaacggtgtgagtaccgcaggggcttatatggccctcgttcacctgttctttttaattggagaaggtgtcactaacgaaaatattgcaaaattattgagaaaaccctacccaaaattattttctgcagcgggtagaatattaaggttatgggatgatttaggtacagctaaggaagaagaagaaagaggtgacttagctagttgcatgcagattttgatgagggagaaaaacatagattgtgaaaacgaaggtaggaattatatcttaaaagctattaacggtttatggaaagacctaaacgacgagttgataagtcctaatgcaatgcctctagccataactaaggtagctttgaatatggcccgagcatcagaagttgtttacaagcatgaagaggattcttacttctccagtgtagataactatgtgcaagcactatttttcactccaattaac

SEQ ID NO: 1025 - DNA, 1524 bp, Lactuca sativa
atgtctgaagtacatggtagcaatagagtaactgaattaaaggaaaaaattagagcattaatgacagacagcaatccaatcatacttatggagttggtagataaaattcaacgtttaggtctcggttgcacgtttgaagaggatatcaataaaatcatgaaatacttggtacaaggtcatccaaatgacgatctttacaccgttagtcttaggtttagacttttgagacacaatggtttgcacgtcaatcctgacgtatttggcagttttatggatgcaaacggtaaatttaaagaatctttatcagaggacattgaagcactattgtcgttatatgaagcttcctatatgggagcagacggtgaagatatattatctgaagcaagagaattcacgacaagacaccttaagaaatcagtttttaagttgaccccactgttgagaaacaaagtcctgcaatcactgaagctacctagacatttgagaatggagaggttagaagcaagaatgtacatcgaagaatatggtaatgaacaagaccatatcccaattttactagaactggctaagcttgaatataatgaaattcaaatactacaccagatggaaatctctgaaataaccaggtggtggaaacacttaggactgactgacaagttaccatttgccagagataggccactagaatgttttctttggacggttggtttgttaccagaacggaaatactctaccaaacgtatcgaagtggcaaagaccatttcgattctgttggtaatcgatgatatttttgatacctacggttcatacgatgacctagttctatttacaaaggcgatacagagatgggatatgcaagaaatcgaacaattgcctgaatacatgaaaatatgttacatggcattgtgtaatacaacgaacgaaatctgctatgaaatcttgaaggaacatgggttaaatgtgttgccttttctgagaaagacgtggatagaaatggttgaagcgtttatggtggaagctgagtgggtcaaaagaggtaccgaacctaatttgaaagactacattgagaatggtgtgaagacggctggtacttacatggccttagtgcacttattcttccttataggtgagggcgtgacacctgaaaacatgcgtaccctaactgattcgtatccaagttttttctcaatttctggcaccattcttcgtttatgggatgatctaggcacctcgaaggaggaacaagagcgtggcgatgtagcttcttctattcaattattgatgaaagaaaaaaatatcacttgcgaggaagaaggacgtaagtatatcttgcaatttattgatagttcctggaaggaactgaataagactcttgtggttccaaatacgttgcccatctctataataagaatagccttaaatatggctagagcttcccaagtagtttatcaacatgaagaatcttcttactttagtagggttgataatcacgttaaatcgttattttttgctccaattcaaatt

SEQ ID NO: 1026 - DNA, 1551 bp, Citrus clementina
atgcaaaacgttctaacctatgaaggggatagaggcactaaatcacttgaggaagagttgcaagagagaaccagaaaagctttaagaaaatcctcaaacgatccaaccgcaactatgaagttgattgataccattcagcgtttgggtattggatatcactttgaggatgaaataatggaacgccttgagaggttctcggatggagacgcagccggtgaagagaacttgtttgagaacgccctcagattcagactgctaaggcataacggtctgcctgcatgcacagacatttttaaaaaattcataaataaggagggtaaattaaaggaaagtgtatcaaaggatacaagaggtatgttgtctttatatgaagcatcctacttggctactcaagataaagatattctgtttgaagctatggaattcacaaaaacagaacttacccaaagtgtgtccctaatggattcacagtctagccgtcatgtcgttcaagccttagccctaccaagacatttaagaatgtctagaagcgaagcgggtaattacattaatgaatacagtcaaagttggaatcatgatcaaacactacttcaacttgctaaaagtgatttcaacatggtccaaagcttgcaccaacgggaattggccgaaattaagagatggtggaagcaattaggcctagtagacaaactaggttttggtcgtgacagaccacttgaatgttttttgtggactgtgggaatatttcccgaaccgtattattctaattgcaggatagagttggcaaagacaatcgctcttttacttgttattgacgatatattcgacacatacggaagtttatccgacttggtcctatttactgaggctatacaaaggtgggaccttggggcaatggaacacatacccgaatacatgaaaatttgttacatggccttatacaacacaacaaatgagatttcatacagaatccttaaagatcatggttggaatgttgtcccacaattaaagagaacttggatcgatattttcgaggctcaattgtcagaagcgaaatggttttcggaggggtacgtccctacccaagaacagtatttgaggaatggtgttactacaggcggcacctatatggcgttagttcatgcgttttgtttgatgggtcaagacgtgaccaaagaaacattggcaatgatggagccctatccaaatctgttttcatgttctggcaaaatcctgagattatgggacgatctgggtactgcaagagaagaacaagagcgtggcgatgtggcgtcgagtatagaatgttatatgcgagaaaaaacaataagttgcgaagaagaggctagaaaacatattaggcaactcataagatccctgtgggttgaattaaatggtatgcttgttgccccagcagctcttccagcttctattgttaatgcatcccttaatttagctaggacggcacaagtggtttatcaacatggcgacgataatactgttacgagtgttaatggtcatatcgaaagattattttgcaaccccctaaca

SEQ ID NO: 1027 - DNA, 1695 bp, Medicago truncatula
atggttgtgactgagttaagagtttcgtgcttaacctcagcacttagttgctgtaattccaggtcgtctacataccattcacgcattttattgttgcaaaaatcaaaacccgggtttatgcacagaaagttgtctattaattctacagctttgaacgacaaagttgcgccactgcaaacggatgattccaccaagagccttgaacaggttaaaagaaaaagccaggaagctttacttaactcctctgaccccatggtggctctaaagatgatagacagcattcaaggattagggatagggcaccatttggaagatgaaattaatattcagttaggaagaatatgtgattgggatttaagtctagacctattcggaacttcactgcaatttagattactccgacataacggctggcctacgtgttccgacgtttttaagaaatatttggataagtctgggaattttaaggaatcgctcacaaaagatatatggggaatgctttccctatacgaagctagccacttaggtacagaagatgaagaaatattaaagagagctatgaaattctctagcgctcacctcaacgaattaatcccacacttgtctcctgaaataggtagaaacatagcaaagtcacttactttacctaaacatttacgaatggctagattggaggctaggaactacatggaggaatacagcaagggatccaatcaaattccagctctcttggaactagccaagttggatagcgatatggttcagtcattgcaccaaagagaattaacagaaatttgtcgttggtcaaaagaattgggattgatagaacggttaagtttcgcaagagatagacctacggagtgtttcttatggactgttggaatctttcctgagccgtgctattcaaattgtcgtatagaattgacgaaaactatatgcattttagacgttatagatgacatttttgataattatgggacattagaagacctggtgttgttcactaaagcaattaagaggtgggacttggatggtatggaacaacttccggaatacatgaaaatttgttatatggcattatacaacacgactaacgaaatcgcctatcgcattcagaaggagcatggtttgacagttgttagttgtctgaaaaagacttggatggatatgtttgatgcttatttggaggaagcaaaatggtttaattcaggttatgtgcctagcttcaaaacttatcttgataacggtgttatttcagtcggctcgtgcatggcattagttcacagcacctttctgattggtgatggcctgtctaaagagaccatttccatgatgaagcaataccctcgattgttcagctgttctggagaaattctccgcctgtgggatgatttgggtacctccaccgaggaacaggaaagaggggacaatgcctgctccatacaatgcctcatgaaagaaaataatatttcggatgaaaacgaagcacgtaaacatttgcgtttattaattggtaatttgtggagggagctgaacggtctggccatgagcaagacaattcctttgagcgtagttaaagcctccttgaatatggccagaacggcacaagttatttaccaacatggagacgatcaatctaccttcacggttgatgattacgtgcagacattgatttttacatcgttccccaatagt

SEQ ID NO: 1028 - DNA, 1740 bp, Cicer arietinum
atggccgtcatcaatgaactgagaatttcttatcttacaaacagtatcgctcggtcgtactccagaataagcatttaccaatcacaaattttgtctcttcagaagtctaaatcggaaattatgcacagcaagtttacgattaaatctgtagctttgaatcataaagtcgtgcctttacaatctgatgataggtcaaaaagcctagaacaagttattcgacgatcaagagaagtattattgaattcaagtgatccaattttaaccttgaaaatgatcgactcaattcaaggattgggtataagtcatcacttcgaagatgaaatcaatatccagcttggtagaatttgcaactgggatacttcccaagacatttttgctacttccttgcaatttcgattgttacgacataatggatacccaaccacatctgacgtttttagaaaatttcttgataagagtggtaactttaaagaatcgttcaccaaggatatatggggtatgttgtctctttacgaagcttctcatttgggtacagaggacgaagaagtattaaaaaaagcaatggaattttcgaaaactcacctgaatgaactgattcctaatttggcaccagaagttggtagtcacattgcaagagctttgacaataccgaaacaccttagaatggtaagattagaagcacgcaactatatggaagaatatcgtcaggctactgaccaaatttccgtcttcctagaattggcaaaattagatagtcaaattattcagagtttacaccaacgcgaacttgccgaaatctccagatggtggaaggaattgggtgttgttgatagaattggtttcggtcgtgatagaccaactgaatgttttctatggaccgtcggtatatttccagaaccttactacacaaattgtagaatcgaattgaccaaaaccatatgtatattgttagttatggatgatatctttgacacttatggcacttttcacgaactagtattatttacaaacgcaataaaacgctgggacttagacgcaatggagcaacttccagaatatatgaaaatctgttacatggccttgtataatactactaatgaaattgcttacagaattcaaaaagaacatggtttaaatgttgtaagtcatctgaaaagaacctggattgatattttcgatgccttcctagaggaggcaaagtggtttaattccggttatgtaccctcattcaaaacttacctggataatggcgtaataagtgcgggttcatgtatggccttagttcatgcgacttttttaattggcaaccatgttcatgggttatcaaaagaaacctttagtacgacgaagccatacccacgcttattttcatgttccggggaaatcttaagactttgggatgatctaggtactagcacagaagaacaagaaagaggggataatgcatccagcatacaatgtttgatgagagaaaataacattagtgatgaaaacgaagggcgtaagcacataaggttgctaattgggaagctatggcgggaattaaatggattagtcatgacaaagactatccctttctctattgtgaaggcttctttgaacatggctagaacctcacaattaatttatcaacacggcgatgataagactacttttacagttgacgactatgttcagactctaatatttacttcgcgtggtggtcatggttccgacagagtgggttttggtagcaagact

SEQ ID NO: 1029 - DNA, 1941 bp, Citrus sinensis
atggcgagcgcactggttgatgatgatgaagacggaaatcaacaccaccaagatccaaaacgtcaatatgaacaatgtctaaagaaatgtgaaaggcgtgaaggaggtgttgtcgctgttcaagctgcagccagaaaccggtcgcgtaagagtaatgaagaagaaaagaaaagagaatgcttgacaccacaagcaaccggaagggaccaaaaaaagtccaacaaaggagcaatcttgacaacatttacgaataaagatagcgggccattggtctccttacgcactaggtcatggcagcaaggaaggtcattacacagtaactcattgtcatgtatttgccaattatctagtttacctaagccactcgttacagactttaagaccagtccaaggcaaaatgtcttgacctatgaaggtgacaggggcacaaagagtctggaggaggaattacaagaaaggacccgaaaggccctacgcaaatcctctaacgacccaaccgctacaatgaaattgatagacactatccaacgattgggtattggctaccactttgaagatgaaataatggaacgtttagaaaggtttagtgatggtgacgctgcaggtgaggaaaatttgtttgagaacgccttaagatttaggctccttaggcacaatggactgccagcatgtaccgacattttcaaaaagttcataaacaaggaaggtaaattgaaagagagcgtttctaaagatacgaggggaatgttatcattgtacgaagcatcttatctagcaacccaagacaaagatattctttttgaagctatggaatttaccaaaactgaattgactcaatctgttagccttatggattcccaatcgtctcgccatgtggtgcaagccttagctttgccacggcacctacggatgtccagaagtgaagcaggtaactacattaatgagtattcgcaatcttggaatcatgaccaaactttattgcaactagcgaaatcagacttcaacatggtccaatcgttacaccaaagggaactagcggaaatcaaaaggtggtggaaacaactaggtttggttgataaattaggtttcgggcgtgaccgtccattggagtgttttttatggaccgtgggtatttttccagagccgtattattctaattgcagaattgaattagccaaaacgatcgccctccttttagttattgatgatatctttgacacctatggttctttatctgacttggttttatttacggaggcgattcagagatgggacttaggtgccatggaacacataccggaatatatgaaaatttgttatatggccttgtataacacaactaatgaaatttcataccgtatacttaaagaccatggctggaatgttgtaccccaattaaaaaggacttggattgatatttttgaagctcaattgagtgaggcaaaatggttctctgaaggatatgtccccacacaggagcaatatttgagaaatggtgtcactaccggaggtacgtacatggctttggtccacgctttctgcctaatgggtcaagacgtcactaaggaaacactggccatgatggagccctatccgaacctcttttcgtgctctggaaaaatcctacgattatgggatgacttgggaacagctagagaagaacaagaaaggggcgacgtagcaagttcgatcgaatgttatatgcgcgaaaaaacaatatcatgcgaagaagaggctagaaaacatattaggcaattgattcggtctttatgggtggagcttaatggtatgctagtcgcaccggcggccctgccagcttccattgttaatgcctcattgaacttggcgcgcacagctcaagtagtttatcaacacggtgacgataataccgttacttccgtgaatgggcatatcgaaagactgttctgtaatcccttgacc

SEQ ID NO: 1030 - DNA, 1542 bp, Vigna angularis
atgagttttgttcccatacaaatagatccaggcaaaaagaaactagaacaagttaagagatcttcccaagaaacgctgttgaactcgtcagatcctactaaaactctaaaaataatcgataacattcagagattgggcattgggcaccattttgaggaggagattaacgtaaagctaggtaaagttgccgattgcgactttagccaggacctttgtagcaccgctttgcaatttagactactcagacacaacggttgtcatgctagttccgatgtgtttaagaaatttctcgaccattcaggcaacttcaaggaaagcattaccacggatatttggggtatgttgagtatgtacgaggcatcttatctaggagctaaaggtgaagaggttttgcaacaagccatggatttttccagtgcccacttacaacaatctttgcctttattgagtcctgatgttggaaatcatgtggtcagagcgctcactcttccaagacacttacgtatgtctagattggaagccagaaattacatcgaagaatattcacaagtatcctctaaaatgccatacttattagaaatggctaagatagataacgctatggttcaatcaatgcatcagaaagagttggccgatatatccaggtggtggaaagatctaggtctcgtggaaagattagggtttgccagagataagccagctgaatgttttttgtggacggtaggtgttttcccagaaccatgttattctaactgtaggatagagttggcgaagacgatttgtatcttattggtcatggacgacatattcgacacctatggaactagtgacgagctggttttattcacagaagccatcaagagatgggatctagacgctatggaacaattgccagaatatatgaaaatctcataccttgctctatataatactatccaggagatcgcctgtcgcattcaaatggagcatggacaaactgtcctgtcttgcttaaaacgtacatggattgatattttcgaggccttcttaaaagaggcaaaatggttttctaacaagtacgttccaacatttgaagaatatttagcaaacggtgttatatcttcaggttcttatatggcgttggttcacgccacttttttgattggggatggtattagtaaggaaacgatctctttaatgaatccttacccgagattattttcctgtagcggtgaaattttaagattgtgggacgacttaggtacctctagggaagaacaggagagaggagataacgcgtgctcgttgcaatgccttatgacagagaacaatatttctgatgaaatagtcgctaggaagcaaatccgaggttttattaggaatttgtggcccgaattaaactcactggctttaacaactgcaagtttaccattttcagtcataaaggccagtttgaatatggccagaacttcccaggtaatatatcaaaacggagatgaccaaaatacatttactgtcgatgactacgttcaaacactgctttttactccagccctagaatac

SEQ ID NO: 1031 - DNA, 1857 bp, Helianthus annuus
atgccctacttgatgttccataccacatattatataaatcacatacaacttaagagaaacaaaggaatggcttctcaagcctacatcacatcaattttttctcacaaggtattatatcaaagacagttaataatcattcctcccttcaagggttccaaaaactgtagatctatatttagttcagcgcaggcatgcccaaatacaatcacatctgctacagaagagttaattgataccttgagtccactttctatgactgacacagtttcttattcaggtgatcgaaatagtctaatattggatcactatggtatgatggttatcccaccgcacgatgtcaataatcgtatcgaagaactcaaagagtatacccggagagccttaatgaatacaagtgattctactatgaccttgaaattaattgataccatacagaggctgggtgttggctattattatgaagaagaggagatcaggaaaattttgaaaaaactcactcatgttttgcccaaagacgatctttacactgtcgcccttcattttagattacaacgtcattatgggctgcatactaatccagctgccgaagttttcagaaactttatggatgaaaatggtgaattaaagaaaagttcaagcgaggatatagaaggtgtgttatcattatatgaagcttcatgccttggttcctccggtgaagacttcctactgcatcacaaagagatcactagaagatatcttagtagatcagtgtctaaactgtccctaaaactgcataagaatgtagttgaaggcctaaaattgcctcggcatatgaggatggaaagattggaagctaggagatatattgaagaatatggtaacgaagatgatcacaatccatttgtattggaatttgcaaagtatgactacaataaagttcaatcagtattccaaagagagcttgtagaagtaaatagatggtgggaacatttgggtctaagtagtaagttgggctttgttagagatagacacgttgaatgtttcttgtggaccgtggggcttcttcccgaaccatcttttagtggctcaagaattgaacttgcgaagacaattgctattatgttagttatcgatgatatttatgatacttatggtagttacgatgatctggttttattcacagaggctataaaaaggtgggatttaaatgctatcgaacaattgccagaatacatgaaaatctgttatcaagctttgtacaatacaaataacgaaatttgcgataaaataaaaaaggagagatgtctttcagtacaaccctttcttagaaaaacttggatcgacatggctgaggcctacatggtcgaagcggaatgggtcaaaagaggtcgtatacctacattgaacgactacattgaaaatggagtaaccacctcaggaacctatatggctttagtacatctgttttttttgatttcttacggtttaacaacggaaaacatgaaacatctgctcgacccatatcccaaattcttcactatggctggtactattttgcgcctatgggatgacttgggcacgattaaagaagaacaagagcgaggggatatgctttcgtcaatccatttgttaatgaaagaagagaatataacttgtgaggaagaaggtagggaaggtattcttcaaatgatctacgccttatggaatgacttgaacgttgaactattaacgcctgatgccgttttattcaggatgattaaggtagccttgaatatgagcagaacaagtcaggtagtatatcaacataacgatgactcataccttctaagcgttaaggatcatgtacagtccctcttctacgaaccagtagatatt

SEQ ID NO: 1032 - DNA, 1854 bp, Helianthus annuus
atgccttatttaatgtttcacactacatattatataaatcacatccagcttaaaagaaataagggtatggcatctcaagcatatataacgtctatcttttcccacaaagtgttgtatcaaaggcaattgattatcatacctccttttaaaggctctaagaactgcaggtctattttttcttcagcccaggcctgccccaacacaataacctctgcaactgaagaacttatcgatacactaagtcccttatcaatgacggatactgtttcgtatagtggtgatagaaactcattaatcttggaccactatggaatgatggttataccacctcatgatgtcaacaacagaatcgaagagctaaaggaatacactagaagggcgttaatgaataccagtgattcgacaatgacgctgaaattgattgacacaatccaaagattaggggtgggttactactatgaagaggaggaaataaggaaaattttgaaaaagctgacgcatgtgctacctaaagacgacttgtataccgtggccttgcacttccgtctccaaagacactacggacttcacactaatcctgcagaggtttttaggaattttatggacgaaaacggggaattgaagaaatcgagtagcgaggatattgaaggtgttttaagcctgtatgaagcttcttgcttgggctcatcaggggaagattttttgttacaccacaaagaaatcacgcgtcgatatttatcaagatccgtctcaaaactgtcattgaagttgcacaaaaatgtcgttgaaggcttgaaactaccccgtcacatgagaatggaaagattggaggctaggcgctacatcgaagagtatgggaacgaagacgatcataatccatttgtgttagaattcgccaaatacgattacaataaggtccagtcagtgttccagagagaattagtcgaagttaataggtggtgggaacatctaggcttaagtagtaagttgggttttgtcagggatcgtcatgtggaatgtttcttgtggacggtaggtttgctacccgaaccgtcgttctccggttctagaattgagttggcaaaaactattgcgattatgttggtgatagatgatatttacgatacgtacgggagttatgatgacttagtattatttacagaagcaataaaaagatgggatctcaacgctatagaacaactaccagagtatatgaaaatttgttatcaggccttgtacaatactaacaacgagatttgcgacaaaattaaaaaggagcgctgcctgtctgttcagccattcctgcgtaaaacttggatcgacatggctgaagcttatatggttgaagcagagtgggttaaacgaggtcgtattccgactttgaatgactatatagagaatggtgtaacaacgtcgggtacgtatatggctcttgtacatttgtttttcctcatctcttacggattgacaacagaaaacatgaaacacttgctggatccttaccctaagttttttacgatggctggcactattctgagattatgggatgatttgggaacaattaaggaagaacaagaaaggggtgacatgttgtcatctattcatttattaatgaaagaggaaaatatcacgtgtgaagaagaaggaagggaaggtatcctacaaatgatatatgctctatggaacgatcttaacgtggagttattaactccggatgccgtcttattcaggatgatcaaggttgcactgaacatgtctagaacctcacaagttgtgtatcaacataatgatgattcctacttattatctgtaaaggatcacgtacaatcccttttctatgaaccagtagacatt

SEQ ID NO: 1033 - DNA, 1647 bp, Helianthus annuus
atgccgtacttaatgtttcatactacttattatattaatcatattcaactcaaaagaaataaaggaatggccagccaagcatatatcactagcatatttagtcataaagttttatatcaaagacaacttataatcatccctcccttcaaggggtctaaaaattgcagatcaattttctcttcagcacaagcatgccctaacactattacgtccgcgactgaggagctaatcgacactttgtcccctctcagtatgaccgatacggtatcctattccggtgatcgtaactctctaatacttgaccattacgggatgatggtgatacctcctcatgatgtcaataataggatcgaagagttgaaggagtacactaggagagcgttaatgaacacgtccgattcaaccatgacgttaaaattaattgacaccatacagaggcttggtgtcggttactattatgaagaagaagagatcagaaaaattttgaagaaactgactcacgtgttgcctaaggacgacttgtacacagttgctttacacttcagattgcagaggcattatggacttcacaccaatcctgctggcttaaagttgcctcgtcacatgaggatggaaagattggaagcaagaagatatattgaagaatacggtaacgaggacgatcataacccatttgtcctggagtttgcgaaatacgactacaataaagtccaaagtgtctttcaaagggaattggtcgaagtcaatagatggtgggaacatttgggactttccagtaaattgggatttgttagggacagacatgtggaatgctttttgtggactgtgggtcttttgccagaaccatccttttcgggatcccgaattgaactagccaagactatagcaattatgttagtgattgatgatatatatgatacatatggttcttacgatgacttggtattgtttacggaagctattaaaaggtgggatcttaacgcaatcgaacaattacccgagtacatgaaaatctgctaccaggcactctataataccaacaatgaaatttgtgataagattaagaaagagagatgtttgagtgtacaacctttcttgagaaaaacttggatagacatggccgaagcttacatggttgaagccgaatgggttaagagaggaagaataccgactcttaacgactacatcgaaaatggagttacaaccagcggcacgtatatggcattagtgcatttgttcttccttatctcctatggtttaaccaccgagaatatgaagcatttgctagatccatatccaaagtttttcacaatggccggaacaatcttaagattgtgggacgacttaggtactatcaaggaggaacaagaacgaggcgatatgttgagttctatacaccttcttatgaaagaagaaaacattacgtgtgaagaggaaggtcgagaaggtattttacagatgatctacgcattatggaatgacttgaatgtagaactcttgactcctgacgcggtcctgtttagaatgattaaagttgcattaaatatgagcagaaccagtcaagtcgtttatcaacataatgatgattcttatctattgtcagtgaaggatcatgtccaatcacttttttatgagccagtggacatt

SEQ ID NO: 1034 - DNA, 1524 bp, Olea europaea
atggaaaacattaattgttcagagagaatcgaagagttacgtgagaatactaggaaggctctcagaagagcgctcgatccaatggccgcgatggagttgattgataccttacaatggctgggtatagcatataactacgaagaagaaattgattcctggttgaataagctaataaattgggacgcaggtgatgacttacacgctacaggtttaaggttcaggttactgagaacagaaggtttgcctgtctcctgcgacgtttttgaaaagttcatggaaaagaacggtaagtttaaagagtcgatttcgcaagatacgagaggcctcctttcgttatacgaagcctcaagtctcggtgcctccggagaggacatccttagtgaagctatgagattcgccgttacccatctgcgtttatcgataccgtcgatgggtaaacaactgtgccggcaagttactcgggcgctagagctaccacgccacctgcgtatggcgagactggagtcacgactttatattgatgagtattccatgggttctaatttctcacaaatattgttggagcaagcgaaattagactataataaggtacaatcgttacatcaaatcgagcttgccgaactgagtagatggtggaaacagctaggtttagttgaaaaattaaaatttggtagagacaggcctatggaatgttacttctggacagtcggcatattgcccgatccaaaatactcacaagcgagaatcgaactagcaaaaactatagcaatactactggtgattgatgatatttttgatacatacggttccattaacgaactattgttgtttaatgacgcaatccagaaatggaacttggacgccattgagcaattgcctgcttacatgaaaatctgttatatggcattatacaataataccaatgagattgcttattctatattaaaggaacagggccgcaacgtgcttccgtctttgaaacaagtttggatgaacactatagaggcatttatgattgaagcaaactggtttaattccgggcatgttccaaacttagccaattatttgaagaatgcggtaactacaagtggcagttacatggctttagtacatattttttttttacttggagaaggtatttcacacggtaacgttaaatcaatggagaaaccatatcctaaaatcttctcttgctctggtcaaattttaagattgtgggatgatttgggtactagtaaagaagagcaagaccggggggacaacgccagcagcatcccactattcatgaaggagaaaaacttaccatccgaagatgaagcaagagagtgtataatgcaattaattggaaatttatggaaagagttgaataccgaactgttatctagttctttaccgttaccaattattcgtgcttgcttcaacatgtctcgtacgtccgaagtgatttatcaacatgaagaagactcgtatagcagtggtgttgacaattttgtcaagtttttgctcttggaacccattggcttg

SEQ ID NO: 1035 - DNA, 1815 bp, Olea europaea
atgctaccacaatctcatattgcattggacaggcataagttaagagaatccgaaaaaatagatgagtcggcccacaaaccattagagcaacaaggacgcgagaatgtcattggaaatgacagaatggctattgaaagaatagatatagctgttgtgtctgctatcagatctactaacaaggattttaacatcgagcgaactgcgaagttaggcgtcaaagtattcactggcacagtagatccggcggttgctcaggcatggatgactaaaatagaaagagtattacatacgatggaaaacattaactcatcagagagaatcgaagaattgagagaaaatactcgaaaagtgctgcgaagggccttagatccgatggcagctatggagttgatcgataccttacagtggatcggcattgcatacaattacgaagaagaaatcgactcttggctaaataagttaattagttgggacgcaggagatgatttacacgccacggcattaagatttagattgttgagatcggaagggttaccagtgagttgtgatgtgttcaagaagtttatggaaaaaaacggaaaatttaaagaatccattagtcaagacactcgtggactgttgtcgttatatgaagcgtcctctctaggggcgtccggtgaagacatattgtcagaagcgatgagatttgcagttacgcagcttaggctttcaatgccttcaatgggaaaacagctgtgtaggcaggtaactagagccttagagctgcctagacatcttcgtatggctaggttggaaagcaggttatatattgacgaatactccatggggtcaaacttcaatcaaattctattagaacaagctaagttagattacaacaaagtacaatcgctacaccagattgaactcgctgaattatctaggtggtggaagcagttaggactcgttgagaaacttaagttcggcagagatagacctatggaatgctatttttggaccgttggcattttaccagatccaaagtattcacagccgcggattgagcttgcaaaaactattgcaatcctgttagttattgatgatatctttgacacatacggttcgatcaacgaattactcctgtttaacgatgctattcagaagtggaatctggacgcgatagaacaattgccagcctacatgaaaatctgctacatggctttgtacaatacttcaaatgagatagcctataacattttaaaggaacagggacgaaatgtgttgccttcattgaaaagggtttggatgaatactattgaagcctttatgatagaagccaattggtttagttccgggcatgttccagatttggcaaactacttaaaaaacgctgtcaccacaagtggcagctacatggctcttgtgcatattttttttttattaggggaaggtatatctcatggtaacgttaagtctatggaaaaaccatatccgaagatcttcagttgttctggtcaaattttgagactatgggacgacctgggaacatctaaagaagagcaagataggggagacaacgccagtagcattcccctatttatgaaggaaaaaaatctgccgagtgagggagaagcaagagaatgcatcatgcaactgattggtaacttatggaaagagttgaatactgaacttttaagctcttccctgcctttaccaataataagagcctgtttcaatatgagcaggacttctcaagtaatttaccagcatgaagaagattcttattcctctggtgtagataatttcgtgaaattcttgctcttggagcctattgggctg

SEQ ID NO: 1036 - DNA, 1524 bp, Olea europaea
atggataaaactatatgttccaagggaattgaagaactccaagaaagaactagaaacgctcttcaaagagctcttgaccctatggctgcgatggaattgattgatactcttcagtggttggggattgcttacaattatgaagaagaaatagactcctggttaaataagctaattaattgggatgctggcgacgatttacacgctactgcacttcgttttagactattaaggactgatggctttcctgtgtcttccgatgtgtttaaaaagtttatggaaaagaatggtaagtttaaagagtccatttctcaagacacaagaggcctattatctctgtatgaggcttcgtctttaggggcaagcggtgaagacatactgtccgaagccatgagattcgcggtaacgcatttgagattatctatgccttctatgggtaaaagattgtgtagacaggttaccagagctttagaacttccgaggcatttgagaatggctagactagaaagtcgtctatatattgacgagtattccatgggatcgaacttcaaccaaattttattggaacaggctaaattagactacaataaggttcaatccttacatcaaattgaattagctgagttgtccagatggtggaaacaattaggtttagtcgagaagctcaaattcggcagggatagacctatggagtgttatttctggacaattggcatcttgccagatccaaagtattcgcaaccaaggatcgagctcgctaagacaatagcgattttattagtgatagatgacatattcgatacgtatggttccattaatgagttacttctttttaatgatgccattcaaaagtggaaccttgatgctatagaacagcttccagcatatatgaaaatttgctatatggcattgtacaacactaccaacgaaatagcctacaatattctgaaggagcaagggagaaatgtgttgccatcgctgaaaagggtttggatgaatacaatcgaggccttcatgattgaagcgaactggttcaattctggacacgttccagacttggcaaattatttgaagaatgctgttactacctccggaagctatatggcattagtccacatttttttcttattaggggagggtataagtcacggtaatgtgaaaagtatggagaaaccttaccccaaaatattttcatgcagcggacaaatactaagactctgggacgacctagggacatcaaaggaggaacaagataggggcgataacgcatcttccattccgcttttcatgaaggaaaaaaatttgccgtctgaaggagaggctagagaatgcattatgcagttaataggaaacttatggaaagaattaaacactgaacttttatcctcctcctggccgttacctattataagggcatgttttaacatgtctagaactagccaagtaatttatcaacatgaagaggatagctactcatccggggtggataactttgttaaatttttactgctagaaccaataggctta

SEQ ID NO: 1037 - DNA, 1542 bp, Olea europaea
atgaaggtgcttcatacaatggaaaatataaattgttctaaacgtatcgaggaactacaagaaaatacgaggaaggctctacaaagagcgttagacccaatggccgctatggaacttatcgatacactacaatggctaggaattgcctataattacgaagaagaaattgattcatggttaaataagttaattaactgggatgctggggacgacttacacgcaactggtcttcgttttcgtcttctcaggacagaaggcctcccagtttcctgcgatgttttcaaaaagttcatggaaaaaaatggtaagtttaaggagtctatttctcaagatacacgaggtttgttaagtttatacgaggcctcatctttgggtgcatctggtgaagatatcctctccgaagcaatgcgttttgccgttacccagctgagattatccatgccttcaatggggaagcaattatgtagacaggtaacacgtgcgttggagttacccagacatcttagaatggcacggcttgagtctaggttatatatagatgagtactcaatgggttctaacttcaaccagatacttttagagcaggccaaattagattataataaggtccaatcacttcatcaaatcgaattagccgaactaagtagatggtggaaacaacttggtttagtagagaaattaaaatttggtagagatcgtccgatggaatgttatttttggacggtcggaattttgccagaccctaaatacagtcagccgcgtatcgagttagcaaaaactatagccatcttattggtcatcgacgacatattcgacacctacggtagtattaacgaactcgtgctgttcaacgacgctatccaaaaatggaatttagatgcaattgaacctcttcctgcttacatgaaaatttgttatatggctttgtacaataccacgaacgaaatagcttacaacattcttaaagaacagggtcgaaatgtcctgccatcgttgaagagggtctggatgaatactatcgaagcttttatgatagaagctaactggtttaacagtggtcatgtccccaatctagcaaattatttgaagaatgctgttacgacctcagggtcttacatggctttagtgcatattttcttcttactcggcgaagggattagccatgggaacgtcaaatctatggaaaaaccctatccgaagatttttagttgttccggacaaatactgaggttgtgggacgaccttggcacgtcaaaggaggaacaagatagaggcgataacgcttcaagcataccattattcatgaaagaaaaaaatttggcttcagaaggagaagctcgagaatgtattatgcagttgattggtaacttgtggaaagaattgaacacagaacttctaagttctagtctgccactacccataatcagagcgtgctttaatatgtctagaacttcagaggttatatatcaacatgaggaagactcttactcatctggtgtcgacaattttgtcaaattcttattgctcgaaccgatcggcttg

SEQ ID NO: 1038 - DNA, 1479 bp, Catharanthus roseus
atggattacctgactataatacttacacttctcttcgctctaactctttacgaagctttttcttatttatcacgaagaactaaaaacttacctccaggtccgtcgccactgccatttatcggttctttacatctattgggtgatcaacctcataagtccttggctaaattgtcaaagaaacacggaccgattatgtcgctaaaattaggtcaaatcactaccattgttatatcttcatccaccatggcgaaggaagttttgcagaagcaggatttggccttttcatctagatctgtaccgaatgcgttgcacgcccataaccaatttaaattcagcgttgtatggctaccagtggcatcaaggtggaggtcactcagaaaggtccttaattccaatattttctcgggaaatagattagacgcaaaccaacacttgagaacacggaaagtccaggaattaatagcatactgtagaaaaaactcgcaaagtggtgaagccgtggatgtgggtagagccgcatttagaacttcattaaatctattgtccaatcttattttctcaaaagatctaacggacccatacagcgactctgcaaaagaattcaaggatcttgtttggaacatcatggttgaagcaggcaaacccaacttagtggactttttcccattattagaaaaagttgatccacaaggaatcagacatcgaatgactattcattttggtgaagtgctaaagttatttggtggtttagtcaacgagagactagaacaaaggaggtcaaaaggcgaaaagaacgatgtcctggatgtcttacttactacttcacaggaaagtcctgaagagattgatagaactcacattgaaagaatgtgtttagatttattcgtcgcaggtaccgatacgacaagttctacattagagtgggctatgtcagagatgcttaagaatccagacaaaatgaagaaaactcaagatgaactagctcaagttattggcaggggtaaaaccattgaagaatcagatattaatcgtctaccttatttgaggtgtgtcatgaaggaaactttaagaatacatcctcctgtaccattcctgattccaagaaaggttgagcaatccgttgaagtttgtggttataatgtaccgaaaggttcacaagtattagtcaatgcctgggcaattggcagagacgaaactgtatgggacgatgccttagcattcaagccagaacgctttatggaaagtgaactagatatacgaggcagagactttgagttgattccatttggtgctggccggagaatttgtcctgggttaccgttagctttgcgtacagttccacttatgttgggatccctacttaactcattcaattggaaattggaagggggaatggctcctaaggacttggacatggaggaaaaatttggcatcactttgcaaaaggcacacccacttagagccgtaccatcgactcta

SEQ ID NO: 1039 - DNA, 1479 bp, Catharanthus roseus
atggattaccttaccataatattaactttactatttgccttgactctctatgaagccttcagctacctatccagaagaaccaaaaaccttcctccaggaccatcgccattgccgttcatcggaagcctccatttattaggcgaccaaccacacaaatccttagcaaaactttccaaaaaacacggtccaattatgagtctcaaattaggccagatcactacaatcgtcatatcttcatcaacaatggcgaaagaagttcttcaaaaacaggatttagcattttcaagcagatcagttccaaacgcactccacgctcacaatcaattcaaattctccgttgtatggcttccggtagcctcacgatggagaagtcttcgaaaagttttgaattctaatatattttccggcaatcggctcgacgctaatcaacatttgagaactagaaaagtacaggaactaattgcgtattgccggaaaaatagccagagcggagaagcggttgacgtcggccgagctgcttttagaacttcgttgaatttgttgtcgaatttgattttttcaaaggatttgacggatccttattcggattctgccaaggaattcaaggatttggtttggaatataatggttgaggcggggaaacctaatttggtcgatttttttcccctgcttgaaaaagttgatcctcaaggtatacgacatcgtatgacgattcactttggggaagttcttaagctttttggtggacttgttaatgaaagattggagcaaagaagatcaaaaggggaaaaaaatgatgtgttggatgtacttctaactaccagccaagaaagccctgaggaaatcgatagaactcacattgagcgaatgtgcttggacctgtttgtagcagggacggacacaacatcaagcacattagaatgggcaatgtcagaaatgcttaaaaacccagacaaaatgaagaaaacccaagatgaacttgcacaagtaatcggcagaggaaaaacaatagaagaatccgatattaaccgcttaccttacttaagatgcgttatgaaagaaaccttaaggatacatccaccagttcccttcttaattcctcgcaaagtggaacaaagtgttgaggtttgtggatacaatgtccctaaaggatcacaagttcttgtgaatgcttgggcaattggacgtgatgaaactgtttgggatgatgctttggcattcaaacccgagagatttatggaatctgaattggatatccgtggaagagatttcgagctgattccgttcggtgctggccgaagaatttgcccagggttgccattggcactaaggactgtgcctttgatgcttggttctttgttgaactcttttaattggaagcttgaaggtgggatggctccaaaagatttggatatggaggagaagtttggtattacactgcagaaggctcatcctttgcgtgctgtaccaagcacccta

SEQ ID NO: 1040 - DNA, 1479 bp, Catharanthus roseus
atggattatctgactatcattttgacgttactttttgctctaactctgtatgaggctttctcatacctaagcaggagaacgaagaatcttccccccggtccatcacccctaccatttatcggctcacttcatttgctgggtgaccagcctcataaaagccttgcgaagctttccaaaaaacatggtccgattatgtcattaaagttgggccaaatcacaacaattgttatttctagttccacgatggctaaggaggtcctacaaaaacaagacctggcctttagttccagatccgtaccgaacgctttacatgcgcataaccagttcaagttcagtgtggtgtggctgccggttgcctccaggtggcgtagccttaggaaagttctaaacagtaacatattcagtgggaacagactggatgccaaccagcatctaagaactcgtaaagtgcaagaattgattgcttactgtaggaaaaactctcagtctggtgaagcagttgatgttggacgtgcggcttttcgtacgagccttaatctattatccaatcttattttctccaaagacctgaccgacccctattcagatagtgcgaaggaattcaaagaccttgtgtggaatatcatggtcgaagcagggaagcctaacctagtcgacttcttcccgttattagagaaagtcgacccgcagggtattcgtcataggatgacgattcactttggagaggttttaaagttgttcggcggtcttgtaaatgagagactagaacagagacgttcaaaaggagagaagaatgacgtactagatgttcttttaaccacatcacaggagtctcctgaggagatagacagaactcacattgagcgtatgtgtctagatctatttgttgcgggcactgacacaacttcatctactttagagtgggcgatgtcagagatgttgaagaaccccgacaaaatgaagaagacccaggacgaactggctcaagttattggtagaggcaaaaccattgaggaaagtgatatcaataggttgccgtacttacgttgtgtcatgaaagagactctgaggatacatccgcctgtaccattcctaattcctagaaaggtggagcaatccgtagaggtttgcggatacaacgtcccgaaagggagtcaggttttagtcaacgcatgggctattggacgtgatgaaacggtttgggatgatgctctggctttcaaaccggaaagatttatggagtccgagctagatatcagggggagagactttgaattgattccttttggagccggtagaaggatatgccctgggttgcccctggcccttagaacagtccccctaatgctgggttctctattaaattcatttaattggaagttggagggaggcatggctcccaaagatctagatatggaagaaaagtttggaatcacgttgcaaaaggcccatccactacgtgctgtcccatccacgtta

SEQ ID NO: 1041 - DNA, 1479 bp, Catharanthus roseus
atggattatttaacaattattctgacacttttgtttgcattaaccttgtatgaggcctttagctaccttagcaggcgtacaaagaatcttccccctggtccatccccattaccattcataggttctctgcatttgttgggtgatcaaccgcataaatcgctcgctaaactaagcaaaaagcacggccctataatgtccttgaaactgggtcaaattaccaccattgtaatatcatcctctaccatggccaaagaagtactacagaagcaagacttggcattctcttctcgatcagtacctaacgctttgcatgcccataatcaatttaaatttagtgtagtgtggctaccagtagcatctaggtggagatcattgagaaaggtattaaatagcaacatcttttctggtaaccgcttggatgccaaccagcatctcaggactcgaaaggtgcaagaattgatagcgtactgtagaaaaaattctcaatctggagaggctgtggacgtcggtagggcggctttccggacatcgttgaatttgttgtccaacctaattttctcgaaagatttgacagatccatactccgatagcgctaaagaatttaaagatttggtatggaatattatggttgaagccggaaaacctaacttagtggatttttttccgttattagaaaaagtcgatccacagggtattagacatagaatgactatacactttggtgaagtactgaaactgttcggtgggttggtaaatgaaaggttagagcaaagaagatctaaaggtgaaaaaaacgacgtattagatgtattgctaactactagtcaagaaagtcccgaggaaattgatcgaacgcatattgaacgtatgtgtttggatttgttcgtggctggtactgacacgacctcatctaccttggaatgggctatgtcagaaatgcttaaaaacccggataaaatgaagaaaacccaggacgaactagctcaagtgataggtcgaggtaaaacaatagaggaaagtgacatcaacagattgccttatttaagatgtgttatgaaggaaaccctgagaattcatcctcctgttccctttttgatacctcgcaaggttgagcaatctgtagaagtttgcggttataatgtgccaaagggatctcaagtactagtcaacgcatgggcaattgggcgagatgagaccgtttgggatgacgctttagcattcaagcctgaaagatttatggaaagcgaattggacataaggggcagagattttgagttaatcccttttggtgctggcagacgtatatgtccgggccttcctctcgcgttgagaactgttccattgatgttgggttcattacttaactctttcaattggaaacttgaaggaggtatggccccaaaagatttggacatggaagaaaaatttggtataacgttgcaaaaagcgcatcctctaagagcggtcccatctacttta

SEQ ID NO: 1042 - DNA, 1479 bp, Catharanthus roseus
atggactatctgaccatcatcctgaccctgctgttcgccctgaccctgtatgaggccttctcctatctgtcccggcggaccaagaacctgccccccggcccctcccccctgcccttcatcggctccctgcacctgctgggcgaccagccccacaagtccctggccaagctgtccaagaagcacggccccatcatgtccctgaagctgggccagatcaccaccatcgtcatctcctcctccaccatggccaaggaggtcctgcagaagcaggacctggccttctcctcccggtccgtccccaacgccctgcacgcccacaaccagttcaagttctccgtcgtctggctgcccgtcgcctcccggtggcggtccctgcggaaggtcctgaactccaacatcttctccggcaaccggctggacgccaaccagcacctgcggacccggaaggtccaggagctgatcgcctattgccggaagaactcccagtccggcgaggccgtcgacgtcggccgggccgccttccggacctccctgaacctgctgtccaacctgatcttctccaaggacctgaccgacccctattccgactccgccaaggagttcaaggacctggtctggaacatcatggtcgaggccggcaagcccaacctggtcgacttcttccccctgctggagaaggtcgacccccagggcatccggcaccggatgaccatccacttcggcgaggtcctgaagctgttcggcggcctggtcaacgagcggctggagcagcggcggtccaagggcgagaagaacgacgtcctggacgtcctgctgaccacctcccaggagtcccccgaggagatcgaccggacccacatcgagcggatgtgcctggacctgttcgtcgccggcaccgacaccacctcctccaccctggagtgggccatgtccgagatgctgaagaaccccgacaagatgaagaagacccaggacgagctggcccaggtcatcggccggggcaagaccatcgaggagtccgacatcaaccggctgccctatctgcggtgcgtcatgaaggagaccctgcggatccacccccccgtccccttcctgatcccccggaaggtcgagcagtccgtcgaggtctgcggctataacgtccccaagggctcccaggtcctggtcaacgcctgggccatcggccgggacgagaccgtctgggacgacgccctggccttcaagcccgagcggttcatggagtccgagctggacatccggggccgggacttcgagctgatccccttcggcgccggccggcggatctgccccggcctgcccctggccctgcggaccgtccccctgatgctgggctccctgctgaactccttcaactggaagctggagggcggcatggcccccaaggacctggacatggaggagaagttcggcatcaccctgcagaaggcccaccccctgcgggccgtcccctccaccctg

SEQ ID NO: 1043 - DNA, 1554 bp, Catharanthus roseus
atgtctgctaccaagtcaatcgttggagaggcattggaatacgtaaacattggtttaagtcatttcttggctttaccattggcccaaagaatctctttgatcataataattcctttcatttacaatattgtatggcaattactatattctttgagaaaggaccgtccccctggtccatccccattaccattcataggttctctgcatttgttgggtgatcaaccgcataaatcgctcgctaaactaagcaaaaagcacggccctataatgtccttgaaactgggtcaaattaccaccattgtaatatcatcctctaccatggccaaagaagtactacagaagcaagacttggcattctcttctcgatcagtacctaacgctttgcatgcccataatcaatttaaatttagtgtagtgtggctaccagtagcatctaggtggagatcattgagaaaggtattaaatagcaacatcttttctggtaaccgcttggatgccaaccagcatctcaggactcgaaaggtgcaagaattgatagcgtactgtagaaaaaattctcaatctggagaggctgtggacgtcggtagggcggctttccggacatcgttgaatttgttgtccaacctaattttctcgaaagatttgacagatccatactccgatagcgctaaagaatttaaagatttggtatggaatattatggttgaagccggaaaacctaacttagtggatttttttccgttattagaaaaagtcgatccacagggtattagacatagaatgactatacactttggtgaagtactgaaactgttcggtgggttggtaaatgaaaggttagagcaaagaagatctaaaggtgaaaaaaacgacgtattagatgtattgctaactactagtcaagaaagtcccgaggaaattgatcgaacgcatattgaacgtatgtgtttggatttgttcgtggctggtactgacacgacctcatctaccttggaatgggctatgtcagaaatgcttaaaaacccggataaaatgaagaaaacccaggacgaactagctcaagtgataggtcgaggtaaaacaatagaggaaagtgacatcaacagattgccttatttaagatgtgttatgaaggaaaccctgagaattcatcctcctgttccctttttgatacctcgcaaggttgagcaatctgtagaagtttgcggttataatgtgccaaagggatctcaagtactagtcaacgcatgggcaattgggcgagatgagaccgtttgggatgacgctttagcattcaagcctgaaagatttatggaaagcgaattggacataaggggcagagattttgagttaatcccttttggtgctggcagacgtatatgtccgggccttcctctcgcgttgagaactgttccattgatgttgggttcattacttaactctttcaattggaaacttgaaggaggtatggccccaaaagatttggacatggaagaaaaatttggtataacgttgcaaaaagcgcatcctctaagagcggtcccatctacttta

SEQ ID NO: 1044 - DNA, 1488 bp, Catharanthus roseus
atggagttgttaaagcttctgtgtttgattttatttcttactctttcctatgtcgcctttgcaatcattgtcccacctctaaactttcccaaaaatataccccctggtccatccccattaccattcataggttctctgcatttgttgggtgatcaaccgcataaatcgctcgctaaactaagcaaaaagcacggccctataatgtccttgaaactgggtcaaattaccaccattgtaatatcatcctctaccatggccaaagaagtactacagaagcaagacttggcattctcttctcgatcagtacctaacgctttgcatgcccataatcaatttaaatttagtgtagtgtggctaccagtagcatctaggtggagatcattgagaaaggtattaaatagcaacatcttttctggtaaccgcttggatgccaaccagcatctcaggactcgaaaggtgcaagaattgatagcgtactgtagaaaaaattctcaatctggagaggctgtggacgtcggtagggcggctttccggacatcgttgaatttgttgtccaacctaattttctcgaaagatttgacagatccatactccgatagcgctaaagaatttaaagatttggtatggaatattatggttgaagccggaaaacctaacttagtggatttttttccgttattagaaaaagtcgatccacagggtattagacatagaatgactatacactttggtgaagtactgaaactgttcggtgggttggtaaatgaaaggttagagcaaagaagatctaaaggtgaaaaaaacgacgtattagatgtattgctaactactagtcaagaaagtcccgaggaaattgatcgaacgcatattgaacgtatgtgtttggatttgttcgtggctggtactgacacgacctcatctaccttggaatgggctatgtcagaaatgcttaaaaacccggataaaatgaagaaaacccaggacgaactagctcaagtgataggtcgaggtaaaacaatagaggaaagtgacatcaacagattgccttatttaagatgtgttatgaaggaaaccctgagaattcatcctcctgttccctttttgatacctcgcaaggttgagcaatctgtagaagtttgcggttataatgtgccaaagggatctcaagtactagtcaacgcatgggcaattgggcgagatgagaccgtttgggatgacgctttagcattcaagcctgaaagatttatggaaagcgaattggacataaggggcagagattttgagttaatcccttttggtgctggcagacgtatatgtccgggccttcctctcgcgttgagaactgttccattgatgttgggttcattacttaactctttcaattggaaacttgaaggaggtatggccccaaaagatttggacatggaagaaaaatttggtataacgttgcaaaaagcgcatcctctaagagcggtcccatctacttta

SEQ ID NO: 1045 - DNA, 1605 bp, Catharanthus roseus
atgagttctgtcgcagaaaatataatacaacatgccactcataattctacgctacaccaattggctaaagaccagccctctgtaggcgtcactactgccttcagtatcctggatacacttaagtctatgtcatatttgaaaatatttgctactttaatctgtattcttttggtttgggaccaagttgcatatcaaatcaagaaaggttccatcgcaccccctggtccatccccattaccattcataggttctctgcatttgttgggtgatcaaccgcataaatcgctcgctaaactaagcaaaaagcacggccctataatgtccttgaaactgggtcaaattaccaccattgtaatatcatcctctaccatggccaaagaagtactacagaagcaagacttggcattctcttctcgatcagtacctaacgctttgcatgcccataatcaatttaaatttagtgtagtgtggctaccagtagcatctaggtggagatcattgagaaaggtattaaatagcaacatcttttctggtaaccgcttggatgccaaccagcatctcaggactcgaaaggtgcaagaattgatagcgtactgtagaaaaaattctcaatctggagaggctgtggacgtcggtagggcggctttccggacatcgttgaatttgttgtccaacctaattttctcgaaagatttgacagatccatactccgatagcgctaaagaatttaaagatttggtatggaatattatggttgaagccggaaaacctaacttagtggatttttttccgttattagaaaaagtcgatccacagggtattagacatagaatgactatacactttggtgaagtactgaaactgttcggtgggttggtaaatgaaaggttagagcaaagaagatctaaaggtgaaaaaaacgacgtattagatgtattgctaactactagtcaagaaagtcccgaggaaattgatcgaacgcatattgaacgtatgtgtttggatttgttcgtggctggtactgacacgacctcatctaccttggaatgggctatgtcagaaatgcttaaaaacccggataaaatgaagaaaacccaggacgaactagctcaagtgataggtcgaggtaaaacaatagaggaaagtgacatcaacagattgccttatttaagatgtgttatgaaggaaaccctgagaattcatcctcctgttccctttttgatacctcgcaaggttgagcaatctgtagaagtttgcggttataatgtgccaaagggatctcaagtactagtcaacgcatgggcaattgggcgagatgagaccgtttgggatgacgctttagcattcaagcctgaaagatttatggaaagcgaattggacataaggggcagagattttgagttaatcccttttggtgctggcagacgtatatgtccgggccttcctctcgcgttgagaactgttccattgatgttgggttcattacttaactctttcaattggaaacttgaaggaggtatggccccaaaagatttggacatggaagaaaaatttggtataacgttgcaaaaagcgcatcctctaagagcggtcccatctacttta

SEQ ID NO: 1046 - DNA, 1614 bp, Catharanthus roseus
atgcagtacaaactggcgttaaatggtaaaactctaaaaggagagacaactacagaagcagtcgacgccgctacggctgaaaaggtctttaaacagtacgcaaatgataacggagtcgacggggaatggacgtacgacgatgcgacaaaaacgtttactgttaccgagggcggtggatctttgtatgaggcctttagctaccttagcaggcgtacaaagaatcttccccctggtccatccccattaccattcataggttctctgcatttgttgggtgatcaaccgcataaatcgctcgctaaactaagcaaaaagcacggccctataatgtccttgaaactgggtcaaattaccaccattgtaatatcatcctctaccatggccaaagaagtactacagaagcaagacttggcattctcttctcgatcagtacctaacgctttgcatgcccataatcaatttaaatttagtgtagtgtggctaccagtagcatctaggtggagatcattgagaaaggtattaaatagcaacatcttttctggtaaccgcttggatgccaaccagcatctcaggactcgaaaggtgcaagaattgatagcgtactgtagaaaaaattctcaatctggagaggctgtggacgtcggtagggcggctttccggacatcgttgaatttgttgtccaacctaattttctcgaaagatttgacagatccatactccgatagcgctaaagaatttaaagatttggtatggaatattatggttgaagccggaaaacctaacttagtggatttttttccgttattagaaaaagtcgatccacagggtattagacatagaatgactatacactttggtgaagtactgaaactgttcggtgggttggtaaatgaaaggttagagcaaagaagatctaaaggtgaaaaaaacgacgtattagatgtattgctaactactagtcaagaaagtcccgaggaaattgatcgaacgcatattgaacgtatgtgtttggatttgttcgtggctggtactgacacgacctcatctaccttggaatgggctatgtcagaaatgcttaaaaacccggataaaatgaagaaaacccaggacgaactagctcaagtgataggtcgaggtaaaacaatagaggaaagtgacatcaacagattgccttatttaagatgtgttatgaaggaaaccctgagaattcatcctcctgttccctttttgatacctcgcaaggttgagcaatctgtagaagtttgcggttataatgtgccaaagggatctcaagtactagtcaacgcatgggcaattgggcgagatgagaccgtttgggatgacgctttagcattcaagcctgaaagatttatggaaagcgaattggacataaggggcagagattttgagttaatcccttttggtgctggcagacgtatatgtccgggccttcctctcgcgttgagaactgttccattgatgttgggttcattacttaactctttcaattggaaacttgaaggaggtatggccccaaaagatttggacatggaagaaaaatttggtataacgttgcaaaaagcgcatcctctaagagcggtcccatctacttta

SEQ ID NO: 1047 - DNA, 1440 bp, Catharanthus roseus
atggcattgtatgaggcctttagctaccttagcaggcgtacaaagaatcttccccctggtccatccccattaccattcataggttctctgcatttgttgggtgatcaaccgcataaatcgctcgctaaactaagcaaaaagcacggccctataatgtccttgaaactgggtcaaattaccaccattgtaatatcatcctctaccatggccaaagaagtactacagaagcaagacttggcattctcttctcgatcagtacctaacgctttgcatgcccataatcaatttaaatttagtgtagtgtggctaccagtagcatctaggtggagatcattgagaaaggtattaaatagcaacatcttttctggtaaccgcttggatgccaaccagcatctcaggactcgaaaggtgcaagaattgatagcgtactgtagaaaaaattctcaatctggagaggctgtggacgtcggtagggcggctttccggacatcgttgaatttgttgtccaacctaattttctcgaaagatttgacagatccatactccgatagcgctaaagaatttaaagatttggtatggaatattatggttgaagccggaaaacctaacttagtggatttttttccgttattagaaaaagtcgatccacagggtattagacatagaatgactatacactttggtgaagtactgaaactgttcggtgggttggtaaatgaaaggttagagcaaagaagatctaaaggtgaaaaaaacgacgtattagatgtattgctaactactagtcaagaaagtcccgaggaaattgatcgaacgcatattgaacgtatgtgtttggatttgttcgtggctggtactgacacgacctcatctaccttggaatgggctatgtcagaaatgcttaaaaacccggataaaatgaagaaaacccaggacgaactagctcaagtgataggtcgaggtaaaacaatagaggaaagtgacatcaacagattgccttatttaagatgtgttatgaaggaaaccctgagaattcatcctcctgttccctttttgatacctcgcaaggttgagcaatctgtagaagtttgcggttataatgtgccaaagggatctcaagtactagtcaacgcatgggcaattgggcgagatgagaccgtttgggatgacgctttagcattcaagcctgaaagatttatggaaagcgaattggacataaggggcagagattttgagttaatcccttttggtgctggcagacgtatatgtccgggccttcctctcgcgttgagaactgttccattgatgttgggttcattacttaactctttcaattggaaacttgaaggaggtatggccccaaaagatttggacatggaagaaaaatttggtataacgttgcaaaaagcgcatcctctaagagcggtcccatctacttta

SEQ ID NO: 1048 - DNA, 1458 bp, Catharanthus roseus
atggcgttattactggctgtatttttgtatgaggcctttagctaccttagcaggcgtacaaagaatcttccccctggtccatccccattaccattcataggttctctgcatttgttgggtgatcaaccgcataaatcgctcgctaaactaagcaaaaagcacggccctataatgtccttgaaactgggtcaaattaccaccattgtaatatcatcctctaccatggccaaagaagtactacagaagcaagacttggcattctcttctcgatcagtacctaacgctttgcatgcccataatcaatttaaatttagtgtagtgtggctaccagtagcatctaggtggagatcattgagaaaggtattaaatagcaacatcttttctggtaaccgcttggatgccaaccagcatctcaggactcgaaaggtgcaagaattgatagcgtactgtagaaaaaattctcaatctggagaggctgtggacgtcggtagggcggctttccggacatcgttgaatttgttgtccaacctaattttctcgaaagatttgacagatccatactccgatagcgctaaagaatttaaagatttggtatggaatattatggttgaagccggaaaacctaacttagtggatttttttccgttattagaaaaagtcgatccacagggtattagacatagaatgactatacactttggtgaagtactgaaactgttcggtgggttggtaaatgaaaggttagagcaaagaagatctaaaggtgaaaaaaacgacgtattagatgtattgctaactactagtcaagaaagtcccgaggaaattgatcgaacgcatattgaacgtatgtgtttggatttgttcgtggctggtactgacacgacctcatctaccttggaatgggctatgtcagaaatgcttaaaaacccggataaaatgaagaaaacccaggacgaactagctcaagtgataggtcgaggtaaaacaatagaggaaagtgacatcaacagattgccttatttaagatgtgttatgaaggaaaccctgagaattcatcctcctgttccctttttgatacctcgcaaggttgagcaatctgtagaagtttgcggttataatgtgccaaagggatctcaagtactagtcaacgcatgggcaattgggcgagatgagaccgtttgggatgacgctttagcattcaagcctgaaagatttatggaaagcgaattggacataaggggcagagattttgagttaatcccttttggtgctggcagacgtatatgtccgggccttcctctcgcgttgagaactgttccattgatgttgggttcattacttaactctttcaattggaaacttgaaggaggtatggccccaaaagatttggacatggaagaaaaatttggtataacgttgcaaaaagcgcatcctctaagagcggtcccatctacttta

SEQ ID NO: 1049 - DNA, 1569 bp, Catharanthus roseus
atgcagtacaaactggcgttaaatggtaaaactctaaaaggagagacaactacagaagcagtcgacgccgctacggctgaaaaggtctttaaacagtacgcaaatgataacggagtcgacggggaatggacgtacgacgatgcgacaaaaacgtttactgttaccgagggcggtggatctccccctggtccatccccattaccattcataggttctctgcatttgttgggtgatcaaccgcataaatcgctcgctaaactaagcaaaaagcacggccctataatgtccttgaaactgggtcaaattaccaccattgtaatatcatcctctaccatggccaaagaagtactacagaagcaagacttggcattctcttctcgatcagtacctaacgctttgcatgcccataatcaatttaaatttagtgtagtgtggctaccagtagcatctaggtggagatcattgagaaaggtattaaatagcaacatcttttctggtaaccgcttggatgccaaccagcatctcaggactcgaaaggtgcaagaattgatagcgtactgtagaaaaaattctcaatctggagaggctgtggacgtcggtagggcggctttccggacatcgttgaatttgttgtccaacctaattttctcgaaagatttgacagatccatactccgatagcgctaaagaatttaaagatttggtatggaatattatggttgaagccggaaaacctaacttagtggatttttttccgttattagaaaaagtcgatccacagggtattagacatagaatgactatacactttggtgaagtactgaaactgttcggtgggttggtaaatgaaaggttagagcaaagaagatctaaaggtgaaaaaaacgacgtattagatgtattgctaactactagtcaagaaagtcccgaggaaattgatcgaacgcatattgaacgtatgtgtttggatttgttcgtggctggtactgacacgacctcatctaccttggaatgggctatgtcagaaatgcttaaaaacccggataaaatgaagaaaacccaggacgaactagctcaagtgataggtcgaggtaaaacaatagaggaaagtgacatcaacagattgccttatttaagatgtgttatgaaggaaaccctgagaattcatcctcctgttccctttttgatacctcgcaaggttgagcaatctgtagaagtttgcggttataatgtgccaaagggatctcaagtactagtcaacgcatgggcaattgggcgagatgagaccgtttgggatgacgctttagcattcaagcctgaaagatttatggaaagcgaattggacataaggggcagagattttgagttaatcccttttggtgctggcagacgtatatgtccgggccttcctctcgcgttgagaactgttccattgatgttgggttcattacttaactctttcaattggaaacttgaaggaggtatggccccaaaagatttggacatggaagaaaaatttggtataacgttgcaaaaagcgcatcctctaagagcggtcccatctacttta

SEQ ID NO: 1050 - DNA, 1395 bp, Catharanthus roseus
atggcaccccctggtccatccccattaccattcataggttctctgcatttgttgggtgatcaaccgcataaatcgctcgctaaactaagcaaaaagcacggccctataatgtccttgaaactgggtcaaattaccaccattgtaatatcatcctctaccatggccaaagaagtactacagaagcaagacttggcattctcttctcgatcagtacctaacgctttgcatgcccataatcaatttaaatttagtgtagtgtggctaccagtagcatctaggtggagatcattgagaaaggtattaaatagcaacatcttttctggtaaccgcttggatgccaaccagcatctcaggactcgaaaggtgcaagaattgatagcgtactgtagaaaaaattctcaatctggagaggctgtggacgtcggtagggcggctttccggacatcgttgaatttgttgtccaacctaattttctcgaaagatttgacagatccatactccgatagcgctaaagaatttaaagatttggtatggaatattatggttgaagccggaaaacctaacttagtggatttttttccgttattagaaaaagtcgatccacagggtattagacatagaatgactatacactttggtgaagtactgaaactgttcggtgggttggtaaatgaaaggttagagcaaagaagatctaaaggtgaaaaaaacgacgtattagatgtattgctaactactagtcaagaaagtcccgaggaaattgatcgaacgcatattgaacgtatgtgtttggatttgttcgtggctggtactgacacgacctcatctaccttggaatgggctatgtcagaaatgcttaaaaacccggataaaatgaagaaaacccaggacgaactagctcaagtgataggtcgaggtaaaacaatagaggaaagtgacatcaacagattgccttatttaagatgtgttatgaaggaaaccctgagaattcatcctcctgttccctttttgatacctcgcaaggttgagcaatctgtagaagtttgcggttataatgtgccaaagggatctcaagtactagtcaacgcatgggcaattgggcgagatgagaccgtttgggatgacgctttagcattcaagcctgaaagatttatggaaagcgaattggacataaggggcagagattttgagttaatcccttttggtgctggcagacgtatatgtccgggccttcctctcgcgttgagaactgttccattgatgttgggttcattacttaactctttcaattggaaacttgaaggaggtatggccccaaaagatttggacatggaagaaaaatttggtataacgttgcaaaaagcgcatcctctaagagcggtcccatctacttta

SEQ ID NO: 1051 - DNA, 1413 bp, Catharanthus roseus
atggcgttattactggctgtatttccccctggtccatccccattaccattcataggttctctgcatttgttgggtgatcaaccgcataaatcgctcgctaaactaagcaaaaagcacggccctataatgtccttgaaactgggtcaaattaccaccattgtaatatcatcctctaccatggccaaagaagtactacagaagcaagacttggcattctcttctcgatcagtacctaacgctttgcatgcccataatcaatttaaatttagtgtagtgtggctaccagtagcatctaggtggagatcattgagaaaggtattaaatagcaacatcttttctggtaaccgcttggatgccaaccagcatctcaggactcgaaaggtgcaagaattgatagcgtactgtagaaaaaattctcaatctggagaggctgtggacgtcggtagggcggctttccggacatcgttgaatttgttgtccaacctaattttctcgaaagatttgacagatccatactccgatagcgctaaagaatttaaagatttggtatggaatattatggttgaagccggaaaacctaacttagtggatttttttccgttattagaaaaagtcgatccacagggtattagacatagaatgactatacactttggtgaagtactgaaactgttcggtgggttggtaaatgaaaggttagagcaaagaagatctaaaggtgaaaaaaacgacgtattagatgtattgctaactactagtcaagaaagtcccgaggaaattgatcgaacgcatattgaacgtatgtgtttggatttgttcgtggctggtactgacacgacctcatctaccttggaatgggctatgtcagaaatgcttaaaaacccggataaaatgaagaaaacccaggacgaactagctcaagtgataggtcgaggtaaaacaatagaggaaagtgacatcaacagattgccttatttaagatgtgttatgaaggaaaccctgagaattcatcctcctgttccctttttgatacctcgcaaggttgagcaatctgtagaagtttgcggttataatgtgccaaagggatctcaagtactagtcaacgcatgggcaattgggcgagatgagaccgtttgggatgacgctttagcattcaagcctgaaagatttatggaaagcgaattggacataaggggcagagattttgagttaatcccttttggtgctggcagacgtatatgtccgggccttcctctcgcgttgagaactgttccattgatgttgggttcattacttaactctttcaattggaaacttgaaggaggtatggccccaaaagatttggacatggaagaaaaatttggtataacgttgcaaaaagcgcatcctctaagagcggtcccatctacttta

SEQ ID NO: 1052 - DNA, 1476 bp, Nepeta cataria
atggatttcctcacaatcttcattggaccattacttgccatcatcgccttattctatgcacgcttaacaatctccacgaggggcaaaaacctgcccccggggccgacgccgcttcccttcatcggaaacctccatttgctcggccaccacccccacaagtccctcgcccgtctggccaagacttacggcccactcatgctcctccgcctcggctccgaaaacaccgtcgttgtctcctccgccgccgtcgctaaagaagtcctccagaagcatgacctcgccttctccagcaggagcatccccgacgccgtccatgctcacgaccagttcaagtactccgtcgtttggctcccggtggcctcgcggtggcgcagcctccgcaaaaccatgaactccaacatcttctccggcagctgcctcgacgccaatcagcatcttaggagcaggaaggtggaggagctcattgcctactgcaaggaaagctgccggagggcggaagccgtcgacgtcggccgcgccgccttcagaaccgccttgaactcgctctccaacaccatattttcgagggatttggccgatccgttgtcggattccggtaaggaattcaaggatgtggtgtcgagtatcatgatggaggcagggaagcccaactccgtggattactatccttttttatcaagatttgatccacaaggaatacgacgtcgcaccgctatctatttcgacaaattgatcaatattttcaaaggtttgatcgatgaaaggttggagaaaagaagatctcaatacgaagaagcaactgatgttatcgatatcctcctcaacaccatcgagcaaaaccccgaagagatcgaccgaactcacatcgaacgaatgtttttggatctgttcttggcgggaacggacacaacttcgagcacagtggaatgggcaatggcggaggcgatgaaaaatccagaaacaatgaagaaagccaaggcagagctagcacaagtgatcggaaaaggaaaaatagtacaagaaaccgacataccgcatctgccatatctgcaatgcattgttaaagagacgctgagactacacccgccggttcccttcctcattccacgcagagtccacgaagacgtcgacatcttgggctacgtcgtgcccaataactcgcaggtcttcgtgaacatgtgggccatcgggcgggaccccgatatgtggaaaaaccctctacagttcgaccccgaccgcttccacgattcggaggtggggttgagggggaaagatttcgagctgattccattcggcgcgggcagaagaatctgcccggggctgccgctggcgatgagaatggtgcccgtagtgctggggtcgcttctgaattcattcgactggaaagtggaaggagggaaggaattagagatgaatgagaagtttggaatcacgttggagaaggctcaaccacttatggctgtccctatcgctctt

SEQ ID NO: 1053 - DNA, 1470 bp, Nepeta mussinii
atggatttcctcacaatcacagttggattagtatctgcaatcatcatcaccttcatctatggattctccttgtcccggagaggcaaaaacctcccgccggggccgacgccgctgccgctcatcggaagcctccatttgctcggcggccaaccacataaatccctcgcccgtctcgccaacatctacgggcccctcatgcgcctccgcctcggctccgtaaacaccatcgtcgtctcctccgctgccgtcgctcgagaagtcctccagaagcacgacctcgccttttccagcaggagcatccccgacgccctccatgctcacgaccacttcaagtactccgtcgtctggcttccggtggcctcgcggtggcgcagcctccgcaaaaccatgaactccaacatcttctccggcagccgcctcgacgccaaccagcacctcaggagtaggaaggtggaggagctcgttgactactgcagggaatgcagtcggaccgcggaggccgtccacgtcggccgcgccgctttccgaacagtcctgaactcgctgtctaacaccatattttcgaaggatttggccgatccgttttcggattctgggaaagaattcaaggaaattgtttctaacatcatgaaggaggcgggaatgcctaatctggttgatttctttccttttttagcaaggtttgacccccaaggaatacggcgtcgtactactgtttacttcggcaagattatccatctcttcagcggattgattcaagagaagttggagaatacaaatcaggaagaaaatattgatgtaatccaaatcctcctcaacactagtcgtcaaagcccccaagagatcgaccggactcacatcgagagaatgtgtttggatctattcgtggctggaacagacacatcttcgagcacagtggaatgggcaatggcggaggcactcaaaaatctagaaaccatgaagacagcgaaagtcgagctagaacaagtgatcgggaaagggaaaacaatacaggagactgatgtatcgcgtctgccatacctgcagtgcatggttaaggagacgctgagactccacccaccagttcccttcctaatccctcgtacagtggaccaagacgtcgaggtgttgggccacgtagtgcctaaaaactcacgagtctttgtgaacatgtgggccatcgggcgggatcccgacgtatgggaaaacccattagagttcaatccccgccgttttctcgattcagaggtggacgtgcggggcacaaattttgagttgattcctttcggagcgggtaggagaatctgtccggggctgccgctggcgatgagaatggtgcccgtaatgttggggtcgcttctaaattcatttgattggaagctggaaggaggagagaatttggatatggatgagaagtttggaataacgttagagaaagcccagccgttgagggttgttcctatctctctc

SEQ ID NO: 1054 - DNA, 1476 bp, Nepeta cataria
atggatttcctgactatctttatcggaccgttacttgcgatcatagctctgttctacgcgagattgacaatcagtacgagaggtaaaaacctacctcccggtcccaccccgctaccttttattgggaatttgcatttattaggacatcacccccataaatccctagcccgtctggcaaaaacctatggcccgttaatgttgcttagattgggatcagaaaacaccgtagtagtctcatcagccgccgtggccaaagaagttttgcagaaacacgacttagctttcagctcaaggagtataccagacgcagttcatgcacatgaccagttcaagtatagtgtggtctggctaccggtggctagccgttggcgttcacttagaaagactatgaattctaacatcttttctggaagctgccttgacgccaatcagcatctaagatcacgtaaggtcgaagagcttatagcatactgtaaggagtcatgtaggcgtgccgaggcggtggacgtcggcagggcagcttttaggaccgctcttaactcactttctaacacaatttttagcagagacctagcggatccgttatccgattcaggtaaggagtttaaagatgttgtgagctccataatgatggaggcggggaaacccaatagcgtagactattacccttttctgtccaggtttgacccccaaggtatcagaagacgtacagcgatatactttgacaagttaattaacatttttaaggggctaattgacgagagactggaaaaaaggaggtcccaatacgaggaggcaacggacgtaattgatatactactgaataccattgaacagaaccctgaagagattgataggacacatatcgaacgtatgtttttggatctttttcttgccggcactgacaccacctcctctaccgtggaatgggccatggcagaggctatgaagaaccccgaaactatgaagaaggcaaaagctgaactggcgcaagtcatcggtaaggggaagattgtacaagagacagatataccccatctaccctatcttcagtgcattgttaaggagacgttgagattacacccaccagtcccatttttgattccgagacgtgtacatgaagatgtagatattctgggatacgtagtcccaaacaactcacaggtatttgtgaatatgtgggctatcggacgtgatcctgatatgtggaagaatcctctacagttcgatcctgacagattccacgatagtgaagtcggactgaggggcaaggattttgagcttattccctttggagctggaagaagaatctgcccaggcttacctcttgcaatgaggatggttccggtggtgttgggatctctactaaacagctttgactggaaggtagaaggcgggaaggagcttgaaatgaatgaaaagttcggcatcactctggagaaggcccagccactgatggcggttccgatcgccttg

SEQ ID NO: 1055 - DNA, 1470 bp, Nepeta mussinii
atggattttttgaccatcactgttggacttgtatccgccattattataacgttcatctacggcttttcactatcccgtagggggaagaatctgccgccaggtcctacaccgttaccgttaattggctcattacatctattagggggacagccgcacaaaagtctagcacgtcttgccaacatatatggacctctgatgagattacgtcttggatccgtgaacaccatcgttgtttcctctgccgccgtcgctagagaagtactacagaagcatgatcttgctttcagctcaagatcaattcctgacgcgcttcatgcacacgaccatttcaaatactcagtagtttggcttcctgttgcctctaggtggagatcattacgtaagacgatgaactctaacattttcagtggcagtcgtctggatgctaatcaacatcttcgttctcgtaaggttgaggagcttgttgactattgcagggaatgcagcaggaccgcggaagctgttcacgtaggacgtgccgcttttagaactgttcttaactcactttctaataccatcttttctaaagacttagccgatcccttttccgacagcggaaaggagttcaaagaaatagtttcaaacattatgaaagaagctgggatgccaaacttagttgactttttcccattcttagccaggttcgatccgcaaggaatccgtagaaggacaacggtgtatttcggaaagattatacatctattcagcggtctgattcaggaaaagctagagaatacgaaccaggaagagaatatagatgtcatacagatactacttaacacctcaagacaatctcctcaagaaattgatcgtactcatatagaaagaatgtgcttagatctgttcgtcgccggcacagatacgtctagctccaccgttgagtgggctatggcagaggcgctgaagaatttagagactatgaagacggcaaaagtggaacttgagcaggttataggaaagggtaaaactattcaggaaacggacgtttcaaggttgccgtatttgcaatgtatggtaaaggagaccctgaggctgcaccctcctgttccttttttgattccacgtaccgtggatcaggacgttgaggtacttggtcacgtggtgcccaaaaattctcgtgtgttcgtcaatatgtgggcgatcggcagggaccctgatgtgtgggagaaccctttggaattcaatccaagaagattcctggacagtgaggtagacgtgagaggaacaaattttgaattgatcccgttcggagcgggaaggcgtatttgtccaggtctaccgttagccatgaggatggtgcctgttatgcttggtagcttattaaactcctttgattggaaattagagggcggggaaaacctggacatggacgagaaatttgggatcacgcttgagaaagcacagccgctgagagttgtgccaatttcactt

SEQ ID NO: 1056 - DNA, 1476 bp, Nepeta cataria
atggattttttgactattttcattggcccattattagcaataattgcactattttacgccaggttaaccattagcactcggggtaagaatttaccaccaggtcctactccactaccttttattggtaatttacatttgctaggtcatcacccacataagtctttggcgagacttgctaaaacttatggaccgttgatgctgctaagattagggtctgaaaatactgtagtagtgagttctgcagccgttgcaaaggaggtattacaaaagcatgatttagctttttcatctagatccataccagatgcggttcatgctcacgatcagttcaaatactctgtcgtctggttacctgtggcatctcggtggcgatcacttagaaaaactatgaattcgaatattttcagcggttcatgcttagatgctaatcaacatttgcgaagtagaaaagttgaagaattgatagcgtattgcaaagaaagttgccgtcgagctgaggctgtcgatgttggaagagctgcattcagaactgctttgaactccctgtccaacaccattttctcgagggatctggcagatcctctgtccgactctggaaaagaatttaaggatgttgtatcttccataatgatggaagcaggcaaacctaacagtgtagactattacccctttctatccagattcgatccccagggaataagaagacgtactgccatttattttgataaattaataaatattttcaaagggttgattgacgagagattggaaaaacgtaggagtcagtacgaggaagcgacagacgtcattgacatacttttgaacacaatcgaacaaaacccggaggaaatcgaccgtactcatattgaaaggatgtttttggacctatttcttgccggtacagatacgaccagtagtacggtcgagtgggccatggctgaggccatgaagaacccggaaactatgaaaaaagctaaagctgagctggcacaggtaattggcaaaggtaaaattgtacaagaaactgatatcccacatttgccatatttgcaatgtattgtgaaggaaactcttcgcttacatccgccggtcccatttcttatacctcgacgcgtacatgaagatgttgacatcttgggttatgttgttcctaataactcacaagtattcgtcaacatgtgggccattggccgcgatccagatatgtggaagaatccactacaatttgatcctgatagattccatgattcagaagtgggtctaagaggtaaagacttcgaacttataccatttggtgctgggcgtagaatctgcccaggattacctttagcaatgagaatggttccagttgttttgggctcactattgaattcatttgattggaaagtcgaaggcggcaaggaattggaaatgaacgaaaagtttggtatcacattggaaaaggcacaacccttgatggcggtaccaattgcacta

SEQ ID NO: 1057 - DNA, 1470 bp, Nepeta mussinii
atggattttttaactattactgttggtctggtcagcgctattattattactttcatctacggtttctcgttgtcaaggagaggaaaaaatttaccacctggcccaacccctctgccattgataggttccctgcatcttttaggcggtcagccccacaaatctttagcgaggctagcaaatatatacgggcctttgatgagattgagattgggttccgtaaatactattgttgtcagttccgctgctgttgcacgggaagtcttacaaaaacatgatctggccttttcctctaggagcatccccgacgctttacatgctcatgatcacttcaagtattctgttgtatggttgcctgtagcatcccgatggcgaagtctgagaaagacgatgaactccaacatcttttctggttcaagactagatgctaaccaacatttgcgttcgagaaaggttgaagagttagttgactattgcagagagtgttctcgaactgcagaagctgtgcatgtcggaagagcagcatttaggactgttcttaacagtctgagcaacacgatttttagcaaagatctggccgatcctttctctgacagtgggaaggaattcaaagagattgtcagcaatatcatgaaagaagccggtatgcccaatctagtcgatttctttcctttcttggcacgttttgatccgcagggaatccggagaaggacaacagtttattttggaaagatcattcatttatttagcggcctgatacaggaaaagttggagaacaccaatcaagaagagaatatagatgttatccaaattctgttaaatacaagtcgtcagagtccacaggaaatcgatcgcacacatatcgaacgtatgtgtctagatttgtttgtcgcgggtacggataccagctcttcaacagttgaatgggcgatggccgaagcattaaaaaatttggagaccatgaaaactgccaaggtcgaattagaacaagttattgggaagggcaaaacaatccaagaaacagatgtaagtaggctgccctatttgcaatgtatggttaaggaaacgttacgcctgcatccacctgtgccattccttattccacggactgtggaccaagatgtagaagtcttaggtcatgtcgtacctaagaatagcagagtctttgtaaatatgtgggcgatcggcagagaccctgacgtttgggagaatccattggagtttaacccgagacgtttccttgactctgaagtcgatgtacgtggcaccaacttcgaattgattccatttggggcgggcagaagaatttgtcctggcctgcctttagcgatgagaatggtgcctgttatgctgggttctttgttaaactcatttgactggaagctggaaggcggcgagaacctggacatggacgaaaagttcggaattaccctagaaaaggctcaacctttgcgtgttgttccaatttcctta

SEQ ID NO: 1058 - DNA, 1476 bp, Nepeta cataria
atggacttcctgaccatcttcatcggccccctgctggccatcatcgccctgttctatgcccggctgaccatctccacccggggcaagaacctgccccccggccccacccccctgcccttcatcggcaacctgcacctgctgggccaccacccccacaagtccctggcccggctggccaagacctatggccccctgatgctgctgcggctgggctccgagaacaccgtcgtcgtctcctccgccgccgtcgccaaggaggtcctgcagaagcacgacctggccttctcctcccggtccatccccgacgccgtccacgcccacgaccagttcaagtattccgtcgtctggctgcccgtcgcctcccggtggcggtccctgcggaagaccatgaactccaacatcttctccggctcctgcctggacgccaaccagcacctgcggtcccggaaggtcgaggagctgatcgcctattgcaaggagtcctgccggcgggccgaggccgtcgacgtcggccgggccgccttccggaccgccctgaactccctgtccaacaccatcttctcccgggacctggccgaccccctgtccgactccggcaaggagttcaaggacgtcgtctcctccatcatgatggaggccggcaagcccaactccgtcgactattatcccttcctgtcccggttcgacccccagggcatccggcggcggaccgccatctatttcgacaagctgatcaacatcttcaagggcctgatcgacgagcggctggagaagcggcggtcccagtatgaggaggccaccgacgtcatcgacatcctgctgaacaccatcgagcagaaccccgaggagatcgaccggacccacatcgagcggatgttcctggacctgttcctggccggcaccgacaccacctcctccaccgtcgagtgggccatggccgaggccatgaagaaccccgagaccatgaagaaggccaaggccgagctggcccaggtcatcggcaagggcaagatcgtccaggagaccgacatcccccacctgccctatctgcagtgcatcgtcaaggagaccctgcggctgcacccccccgtccccttcctgatcccccggcgggtccacgaggacgtcgacatcctgggctatgtcgtccccaacaactcccaggtcttcgtcaacatgtgggccatcggccgggaccccgacatgtggaagaaccccctgcagttcgaccccgaccggttccacgactccgaggtcggcctgcggggcaaggacttcgagctgatccccttcggcgccggccggcggatctgccccggcctgcccctggccatgcggatggtccccgtcgtcctgggctccctgctgaactccttcgactggaaggtcgagggcggcaaggagctggagatgaacgagaagttcggcatcaccctggagaaggcccagcccctgatggccgtccccatcgccctg

SEQ ID NO: 1059 - DNA, 1470 bp, Nepeta mussinii
atggacttcctgaccatcaccgtcggcctggtctccgccatcatcatcaccttcatctatggcttctccctgtcccggcggggcaagaacctgccccccggccccacccccctgcccctgatcggctccctgcacctgctgggcggccagccccacaagtccctggcccggctggccaacatctatggccccctgatgcggctgcggctgggctccgtcaacaccatcgtcgtctcctccgccgccgtcgcccgggaggtcctgcagaagcacgacctggccttctcctcccggtccatccccgacgccctgcacgcccacgaccacttcaagtattccgtcgtctggctgcccgtcgcctcccggtggcggtccctgcggaagaccatgaactccaacatcttctccggctcccggctggacgccaaccagcacctgcggtcccggaaggtcgaggagctggtcgactattgccgggagtgctcccggaccgccgaggccgtccacgtcggccgggccgccttccggaccgtcctgaactccctgtccaacaccatcttctccaaggacctggccgaccccttctccgactccggcaaggagttcaaggagatcgtctccaacatcatgaaggaggccggcatgcccaacctggtcgacttcttccccttcctggcccggttcgacccccagggcatccggcggcggaccaccgtctatttcggcaagatcatccacctgttctccggcctgatccaggagaagctggagaacaccaaccaggaggagaacatcgacgtcatccagatcctgctgaacacctcccggcagtccccccaggagatcgaccggacccacatcgagcggatgtgcctggacctgttcgtcgccggcaccgacacctcctcctccaccgtcgagtgggccatggccgaggccctgaagaacctggagaccatgaagaccgccaaggtcgagctggagcaggtcatcggcaagggcaagaccatccaggagaccgacgtctcccggctgccctatctgcagtgcatggtcaaggagaccctgcggctgcacccccccgtccccttcctgatcccccggaccgtcgaccaggacgtcgaggtcctgggccacgtcgtccccaagaactcccgggtcttcgtcaacatgtgggccatcggccgggaccccgacgtctgggagaaccccctggagttcaacccccggcggttcctggactccgaggtcgacgtccggggcaccaacttcgagctgatccccttcggcgccggccggcggatctgccccggcctgcccctggccatgcggatggtccccgtcatgctgggctccctgctgaactccttcgactggaagctggagggcggcgagaacctggacatggacgagaagttcggcatcaccctggagaaggcccagcccctgcgggtcgtccccatctccctg

SEQ ID NO: 1060 - DNA, 1503 bp, Vigna angularis
atggaaacaaatagcaccctgttttttacgttcacggtgcttttgattacgattataaccttcttaaaggctctgaaatccctgttcacccctaataagtcaaaaagtaatcttcctcccggacctaagggcctaccactagttggaaacctattgcaactaggcgccaaaccacatcagactctggccacgcttgcaaatatacatggaagcattatgagcttaaaacttggacaggagacgactatagtaatgtcatcagctgaggccgcaaaaggcgtacttcaaatccacgaccatttcctgagtaatagaaaaattcctgatgctatgagaggatcaagccacgatcacttctcattgccatttatgccggtaagtcaacaatggagggagttaaggaagctgtgtaacgagttgttattctctaataagaatctggatgcgacgcaggggttaaggtctaagaaggtgagagagctatactctgatatacaccgtagcagtctgaaaggggaacccgttaatattggcagactagccttcaaaacaactatcaaccagctaagcaataccatatatagtgaagacttccttcagagtgctgagaaggcaggtgaaatgaaggaactggtcacgaacatcatgaaagaggttgggaggccaaatcttgcggactgctttccggtattaaaaatgatagacccccatggcattagaaggcgtactggaagctacttctccaaactgttgaatatatttaaatcccttatccataagaggctggagctgcgtaaggatgcagcgggttactgcaccaaaaaagatatgctggacgctatgctgaatgatgcccaacacaagatggatattgtcaaaatacagaggttgtcacttgatttatttgtagctggtacagataccgtaacttccaccgtggaatgggccatggcggaactattacacaacccccacgtcatgtcaaaggccaaagaggaactggagaggattattgggaaagacaatttggtggaggaatccgatatcgcgaagctaccgtatcttcaggcgattgttaaggaaactttcagactgcaccctgcggtcccattactactgccaaggaaagccgaggtggaattcgagatgcacgggtacacgattccaaagggggctcaggttttaatcaatgtttgggcgattggcagggaccccaatctatgggagaagcctagattgttctggccagaaagatttttagaatcagagatagattttaaggggcgtagctttgaattgactcctttcggcggggggaggagaatttgtcccggcctgccattagcgattagactggtgttccttatgttgggcctattcataaacagcttcgattgggaactgcaagatatacagcctgaggatatgaacatggacgaaaactttgggctgaccttagagaaagcacagccggttttagcaatccctattatccctaagcac

SEQ ID NO: 1061 - DNA, 3144 bp, Bacillus megaterium
atgacgattaaggaaatgccgcaaccgaaaacatttggggagctgaagaatctgccgcttcttaacacagataaacctgtacaggctcttatgaaaatcgctgatgagcttggtgaaatttttaagttcgaggcaccaggaagagttacaaggtacctgtccagccaaaggctgattaaggaagcgtgtgatgagtcaaggttcgataagaatagactatggcccactgtgcccctgttttctttatacgccaaagaagatacagtctggacccacgaaaaaaactggaaaaaggctcataacatactgttaccttcatttagccagcaggcaatgaagggttaccacgctatgatggtcgacatcgccgtccaattagttcaaaagtgggagaggttaaacgcagatgaacacattgaagtgcctgaagatatgacccgtttgaccttggacacaatcgggttatgcgggttcaactatagatttaattccttctatagggatcagcctcacccctttatcacatccatggttcgtgcgttagatgaggccatgaataagctacagagggcaaacccggatgaccccgcatacgatgaaaataagagacaattccaagaagatataaaggtcatgaacgacctggttgacaaaatcatagccgacaggaaagcgagcggggaacagagtgatgaccttctaacccatatgttaaatggaaaagacccagagactggcgagccgttagacgacgagaatatccgttatcaaattattacgtttcttattgcgggccacgaaactacttcaggactattatcctttgctctgtactttttagtgaaaaaccctcacgttctacagaaggccgcagaggaagcagcgagggtattagttgatcctgtaccctcttataaacaggtaaagcagttaaaatacgtggggatggtgcttaacgaagctttaaggctttggccgacagcgccggccttctccctttacgcgaaagaagacactgtcctagggggtgagtatccgcttgaaaaaggagacgagttaatggtcttgattccgcagttacatcgtgacaaaacaatctggggagatgacgtggaggagttccgtccagaacgtttcgaaaatccatccgcaatcccccaacacgcattcaaacccttcggcaatggccaacgtgcctgtattggacagcagtttgcgttacacgaggctacgttagtccttggtatgatgttaaagcacttcgactttgaggaccatactaactatgaactggatattaaagagacgttaacgctgaagcccgaaggttttgtggtaaaagctaagtccaaaaagataccactgggcggaataccgtctccctcaaccgaacaatccgctaaaaaggtcaggaaaaaagccgaaaatgcacacaacactccactgttagtattatatggttctaatatgggcacggctgagggtactgcccgtgacctagccgacattgctatgagcaaaggctttgccccacaagtggccacgcttgatagccatgctggaaacttgcctcgtgagggtgccgtcctgatagtcacggctagttataacggacaccctcccgataatgccaaacaatttgtagattggttggaccaggcgtctgccgacgaggttaaaggcgtgagatattctgtatttggctgtggcgataagaattgggcaacgacgtaccaaaaggtacccgcatttatcgacgagactttggctgccaagggtgcggagaacattgctgataggggggaggcagatgcatcagacgatttcgaaggcacttacgaagaatggagggaacatatgtggtcagatgtggctgcttactttaacctagacatcgaaaacagcgaagataacaagtccacgttatccctgcaatttgtcgactcagcggcagacatgccgctagccaaaatgcatggtgccttctccactaatgtggtggcgagtaaagagctacagcagcctgggagcgcccgtagtacgagacaccttgaaatcgaattaccaaaagaagcctcctatcaggaaggggatcacttaggcgtcatcccaagaaactatgaaggaatcgtaaaccgtgtgacagccaggttcgggctagacgcaagccaacaaatccgtttggaggctgaagaagagaaactggcccatctgcctttagcaaaaacggtcagtgtagaggagttgctacagtatgtagaactacaagatcccgtgacaagaacacaattacgtgctatggccgcgaagacagtgtgtcccccacacaaggtagagcttgaagctttgttagaaaaacaggcgtacaaggaacaggttttggctaaacgtcttaccatgctggaactgttagaaaagtacccagcttgcgagatgaagttttcagagtttattgcgcttttaccgagtattaggccgaggtattattctattagcagctcaccgcgtgttgacgaaaagcaagccagtattactgtcagcgttgtgtcaggcgaggcctggtctggttacggggagtataaaggcatcgcgtcaaactacctagcagagctgcaggagggagataccattacatgctttatcagtacaccacaaagtgaatttactctgccaaaagacccggaaacgccgcttatcatggtaggaccgggaacaggtgtagcaccttttcgtggtttcgtacaagccagaaagcagcttaaggagcaaggacaatcccttggtgaagcccacttatacttcggctgtcgttctccccatgaagactacctttaccaagaagaactagagaacgcacaatctgaggggattattacgctgcataccgcattcagtaggatgcctaatcagcccaagacgtatgtacagcatgtcatggaacaagatggcaaaaaactaattgaacttcttgatcagggtgcgcacttttacatctgtggagatgggtctcagatggcccctgccgtcgaagcgacgcttatgaagagctacgcggacgtccatcaagtatccgaggctgacgcgaggttatggttgcaacaactggaagaaaagggcaggtatgccaaagacgtgtgggcgggc

SEQ ID NO: 1062 - DNA, 3144 bp, Bacillus megaterium
atgactataaaggaaatgcctcaacctaagactttcggtgaattaaagaatttaccattgttaaataccgataagccagttcaagctttaatgaagattgctgatgaattgggcgagatctttaaatttgaagctccaggtagagtgactaggtatctttcctcacaacggctaattaaagaggcatgtgatgagtcgagatttgataaaaacagattgtggcctacagttcccttgttttccttatatgcgaaggaggatacggtatggacccatgaaaaaaattggaaaaaggctcataatattttactaccatcttttagtcaacaggcgatgaaaggttaccacgctatgatggtggacattgccgttcaactggttcagaagtgggaaagactaaatgctgatgagcacattgaagtccccgaagatatgactcgactgaccctggacactattggtttgtgcggtttcaactatagattcaactctttttacagagatcaacctcatccgttcataacctccatggtaagagcccttgatgaagcaatgaataaactgcagagggctaatccggacgatcccgcatatgatgaaaataaacgtcagttccaagaagacattaaggttatgaacgacttggtagacaagatcatagcagacaggaaggcatccggtgaacaatcagatgaccttctcacgcatatgttaaatggtaaggatcctgagacgggtgaaccgttagatgatgaaaatatccgataccagattattaccttcctaattgccggccatgagacaacaagcggtttgttatcttttgctttgtattttttggttaagaatccccatgtcttacaaaaggctgcagaagaagctgctagagtcctggtcgatccggtcccatcttacaaacaagttaaacaacttaagtatgtgggtatggttttaaacgaggccttgagactttggccaactgctccagcattttccttatacgccaaggaggacacggttttaggcggagaatatccattggaaaagggtgacgaacttatggttttaataccccaattgcatagagacaaaactatttggggtgacgacgttgaggaatttcgtccggagagattcgagaacccctccgctatcccacaacatgcgttcaagccttttggcaatggtcaaagagcctgtattggacaacagttcgccctgcacgaagccacactagtgctgggtatgatgctcaagcattttgactttgaggatcatactaactatgagttggatatcaaggaaaccttgactttaaaaccagaaggtttcgtcgtcaaagcgaaatctaaaaagataccacttgggggtataccatctccatctacagaacagagcgcaaaaaaagtgagaaagaaagcagaaaatgctcacaacaccccattattagtcctatacggtagcaacatgggtacagctgagggtactgcaagggatctagcagacatcgctatgtccaaaggttttgctccacaggttgcaaccttagatagtcatgccgggaatttacctagggaaggtgcagtgttgattgtaactgcttcgtacaatggacaccccccggataatgctaaacaatttgtagattggttagatcaagcttccgccgatgaagttaaaggagtacgttactcggtgttcggttgcggagataagaattgggcaactacttatcagaaggtccctgcgtttatcgatgagacgctagcggccaagggcgccgaaaatattgccgatcgtggtgaggcagatgcatcagatgacttcgaaggcacttatgaagaatggagagaacatatgtggtcagatgtcgctgcgtactttaatttagatatcgaaaatagtgaggataataagtctacattatccttacaatttgttgattcagctgctgatatgcctttagcaaaaatgcatggagctttctccaccaacgttgttgcttccaaggaactgcagcaacctggctctgctcgtagtacccgtcatttagaaatcgaacttccaaaagaagcaagttaccaagaaggagatcacttaggtgttattcctaggaattacgaaggcatcgtgaatagagtcaccgctcgttttggccttgatgcgtcccaacaaatcaggttggaggcagaagaggagaagctagcacacttgccacttgctaagacagtgtctgttgaggaacttttgcagtatgtcgaattgcaagacccagttacacgtacgcaactgagagctatggccgcaaaaactgtgtgtccgccacataaagtagagctcgaagccctgttggagaaacaagcatacaaggaacaagtacttgctaaaaggctaacgatgttggaactccttgaaaaatatcctgcttgcgagatgaaattcagtgaatttattgcattattaccttccataagacccagatactattccatctcctcatctccgagagtagatgagaagcaggcgagcattacagtatcagttgtgtccggtgaagcctggtctggttatggcgaatataagggcatcgctagtaattatttggcagagttacaagagggtgacacaataacttgcttcatctctacgcctcagtctgaattcacattgccgaaagatccagagacacctctgattatggtgggtcctggaaccggggttgctccctttcgtggttttgttcaagcgcgaaagcagctgaaagagcaaggtcaatccctgggcgaagctcatttatattttggatgcagatctcctcacgaagattacttgtatcaagaagagctcgaaaacgcgcaatctgaaggtatcattacgctccatactgcattctcaagaatgccaaaccagccaaagacctatgttcagcatgtaatggaacaggatggtaagaaattaattgagttattagaccaaggtgcccatttctatatatgcggggacggtagtcaaatggctccggcggtggaagctacactgatgaagtcatatgcggatgtccatcaagtgtcagaagctgatgcaaggctgtggttgcaacaacttgaggaaaaaggaagatatgcaaaagatgtgtgggcaggt

SEQ ID NO: 1063 - DNA, 1494 bp, Camptotheca acuminata
atggacttcttttcgttcttgctgtattttttgtttactctgagtttagtacaagctactatttcactggttcgcggttctaagcataaaggacgaaaattgccaccgggtcctgcaccattgcctatagtaggtaacctactaaaactgggagatcaaccacacaagagtctggccgatttggctaaaatccatggtccaataatgaccctcaagcttggacatataaccactgtcataatttcctcttcagatttagctaaagaggtattgcaaaagcaggatcttgctttctcatcccgttctattccagacgccattagagcccataatcaatttcaatattcagttgtctggttgcctgtggcaaatcaatggaggtcgttgagaaagattcttaattctaatatttttagcgggaatcgtttggacgccaaccaacacttaaggtggagaaaggtgcaagaattgatcgcttacgtgcgcaaatcatctcaagttggcgacgctgtcgatattggtcgcgccgcattcagaacgtcattgaatttgttgtctaacacgatcttcagtgtcgatctggcggatcctaataacgactctgctaaagaatttaaagacttagtgtctaacatcatggttgaggctggtaagcctaaccttgtggattacttccctgttctggaaaagatagatcctcaaggcatcagaagaagaatgacaatccactttgggaaagtattagaaatgttcggaagattaatcaatgaaagattagaattccgtcgtctacgttcatccgtcatttctaacgacgtattggatgtcttactgaacactgaagagtctggtaacgagatcgatagaaaccatattgagcgtatgtgtcttgatttgttcgttgctggcactgacacaacaagctcgactttagaatgggctatggcggaagttttgcataaccccgaaacattggtcaaggctaaggctgagttagaacaaattattggtagaggtaaggcgatcgaagagagcgacatatctaacttgccataccttcgttcaattatcaaagaaactttgcgtttgcatccaccagtcccatttctgatacctagaaaagttgaagtggattccgaggtcagcggttatactgtgcctaagggttcccaggtattggtcaacgcttgggctataggtcgagatccctgctgttgggaaaatccattgaatttttccccagaaagatttttgaattcagagttagatgttagagggagagattttgaattgatcccattcggtgctggtcggaggatttgccctggtttaccattggccattagaatggtaccagtcatgctagggtcgttattgaactccttcgattggaagcttgatggtgggattaaaccagaagaactcgacatggaagagaaattcggcattactttgcagaaagctcaacccttacgggctgtccccacgttagta

SEQ ID NO: 1064 - DNA, 1479 bp, Vinca minor
atggattacttaaccatcgccttaggtttgcttttcgctttgactttttaccagggattgacctatctgtccaggcgttcacaaaagcttcctccaggtccgcttccccttcctatcataggcaatttgcatcttcttggggatcacccacacaaatctctagccaagctgtctaaaaaatacggccctataatgtcgttaaaactgggacgtatcacgaccttagtcatttcttcttcgacgacggcaaaggaggtcctacaaaaacaagatttggcattttcttcaaggtccgtaccgaatgcattgcatgctcacaaccaattccaatactcggtagtgtggttgcctgttgctagtagatggcgttcattgcgaaagattttgaactccaacatcttctcgggaaatcggttagatgcgaaccagcatctaagatgccgtaaggtggaggaattaatagcatactgtaggaaaaactgtcaatccggtgaagcggttgatttaggtagggctgctttcagaacatctctcaacctactttcgaatacgatcttttcaaaggaccttaccgatccttactcggattcggcaaaggagttcaaggatctagtttggaacatcatggtcgaagctggtaagcctaaccttgtagacttttttcctgttttggagaaggtcgatccacaaggtattcgtagacgtatgaccgtacactttggtaaagtcatccagctttttaatggtttaattaacgaacgactggataaaagaaaatcaagggggggatacaatgacgtcctggacgtcttattaacaaccacagaagaaaatcctgaagaaattgacagaacccacatcgaaagaatgtgtttggatttatttgtagcgggaacagacactacaagtagcactttggaatgggccatggccgagatgttgcggaaccccgagaaaatgaaaaaaactcaagaagaactggctgaagtcgttggtcgagggaaattgattgaagaaggagatgtgtcaagattgccatatcttagatgtgtcgtgaaggaaactctgagagttcatccaccagtcccgttcttgattcctagaaaggtagttcaagatgtggaagtgtgcggctacaaagtacctaaaggttcacaagttttagtcaacgcgtgggctatagggagagacgaaacgttttggaaagatgctttaggttttaaaccagagagatttctagagagtgaattggatacccgtggaagagatttcgaattaattccttttggtgcaggtagacggatttgtcccggccttcctttggctaaccgaatggtcccagtaatgttaggatccttgttaaattcgtttaattggaagttagaaggcggcatagcgcctaaagatctcgatatggaggagaaatttggtatcacattacaaaaagcccatccccttagggcagtgccatctccttta

SEQ ID NO: 1065 - DNA, 1479 bp, Ophiorrhiza pumila
atggattatcttactatcgcgctgggcctattgttcgccctaacgttaatccaaggctggtcattcttgagcagaaggagcaaaaagctgccaccgggtccgacccctttgccaattattggtaacctacacttgcttggggatcaaccacataagtctctcgcaaagcttgcaaagacccatggcccacttatgtctctaaagcttgggcagataaccacactagcgattagttcttcgggtatggctaaagaggttttgcaaaagcaagatttggcatttagttccagatcgattcctgatgctattcatgcgcacaatcaattccaatattctgttgtttggttacccgtagcaactaggtggagatcgttgcgaaagatactgaattctaatattttttcaggtaatagacttgacgccaaccaacacttaagatgcagaaaagtacaagaattgatagcatactgtagaaagaattgccagacaggtgaagctgtagatatcggtagagctgcgtttcgtactagtttaaatttactctctaatactatattcagcaaagacctcactgacccatacagcgactctgcaaaagagttcaaagacctagtgtggaacataatggttgaggcgggtaaacctaatttagttgatttcttcccagtcttggagaaatttgacccgcaaggcataaggagaaggatgacaatccacttcggtaaggtattggaaatgttcggaggattgattaacgaaaggttagacaatggtaagtctagaggtggtaataacgacgttttggatgttttgcttaacgcgtctgaagagacacctgatgaaatcgatcgaacccatattgaaagactgtgcttagatctgttcgttgcgggtacagatactacgtctaacacgttagaatgggcgatggctgaaatgttgaaaacaccagaaaaaatgaaaaaagccaaggctgaactagcggaagtcattggtaaaggcaaagccatagaagaagcagatgtcagtcgactgccttacctcagatgtattgtgaaagaaaccttaagattgcatccaccagtaccttttttaattccacgtaaggtggagcaggatgtcgaagtttgtgggtacaatgtgccgaagggtacccaagttttagtaaatgcgtgggctattggaagagatgaaaccacttgggaaaatgcacttgaattcaaacctgagagatttcttgaatccgaacttgacattagaggtcgggactttgaactaataccatttggtgctggaagacggatctgtccaggtttgccgttagcagttagaatggtcccagtaatgttaggttcattgctgaacagtttcgattggaaactaggagggtctattgcccctaaggaccttgatatggaagagaaatttggtattacacttcaaaaggctaacccactgttggcagtccctatatcacta

SEQ ID NO: 1066 - DNA, 1479 bp, Rauvolfia serpentina
atggactacttaaccattacacttggcttattgtttgccttaaccttttaccaaggtctgtcatatttgtcaagacgatcaaagaagctaccacctggaccagctcctctcccgataattggtaatctacatatgttgggtgatcagccccataaaagtctagctaaattatcgaagaagcatggccctattatgtcattgaagttgggtcaaatcaccactgttgtggtctcctcctccggaatggcaaaagaagtgctacaaaaacacgatctggctttctcttcgagatccatcccgaacgcgttgcatgctcacaatcaatatcaattcagtgttgtatggcttccagtggcttctagatggcgttctttgcgcaagacacttaatagtaatattttttccggtaatagactcgatgcaaatcagcacttgcgttcaaggaaagtagaagagttgattgcatactgtagaaagaactgccaaactggggaggccgttgacgtgggacgtgcagcttttagaacatctttaaatttattatcaaacttgatcttctccaaggatttaacagacccatactcggattcagcaaaagaatttaaggatctggtatggaatataatggttgaagctggaaaaccaaatctagtggattactttcctgtactcgaaaaagttgatcctcaggggatcagacgtagaatgacggttcatttcggtaaagttctgaaactttttgatggccttgttaatgagagattagagcaaagaagatctagaggtgggaagaatgatgttttggacgttttgctgaccaatagcgaggaaaatccggaagagatagatagaacacatatcgagagaatgtgcttagatctattcgttgctgggacagatactacgtcttcaaccttagaatgggctatggcggaaatgttaaaaaaccctgacaagatgaagaaaactcaagctgaacttgcagaagttataggtcgtggaaaggccatagaagagtctgatctgccaagactgccatacttgcgatgtgttgttaaggaaaccttaagaattcacccacctgtcccttttttgataccaagacgcgtggaacaagacgttgaagtatgtggttataaggttcccaaggggagccaagtgcttgtcaacgcctggaccatcggtagagatgaagctgtatgggaagatgcacttgcatttaaaccagaacgctttctagaaagcgagcttgacatccgaggaagggattttgaattaataccgtttggggcaggtagaaggatatgtccaggtttgccacttgcacttagaacagtccccttgatggtgggctctctactcaattccttcaattggaaattagagggtggcataactccaaaagatttggatatggaagaaaaattcggtatcactcttcaaaaggcacatccattaagagcagttccaatacccttc

SEQ ID NO: 1067 - DNA, 1494 bp, Lonicera japonica
atggatttctttacaatcgcattgtcgttgttattcgcttttacgttatttaaagcaattatctcgctgacaaaatcgggtaaaaataaaaatcttcctcctggcccagcacccttacccatcatcggttctctgcataaattaggcgatcaaccccaccaaagcttggctaaattggctaagatatacggacctattatgagtctaaagttaggccggattaccactgtcgtgatttctagcagtgatgcagctaaagaagttctacaaaaaaaagatttagctttctcgtcgagacatgtcccagacgcattacatgctcacaatcaattcaaattttcagttgtctggttaccagtagcacctcaatggagatccttaaggaaaatcttgaactctaatatttttagcggtaaccggctagacgcaaatcaacaccttcgatgccggaaagtcgaagaactaatcacatactgcagaaaatcttcccattcaggagacgccgttgatataggtagagctgcttttcgtacaagtctaaatctattgtcaaatactattttcagtaaggatttaactgacccataccaagattctgccaaggagtttaaagaactagtaggtaacatcatggtagaagctggtaaacctaatttagttgatttttttccctctctaaaaaaaattgatcctcaagggatccgacatagaatgactattcattttggaaaggtcctggaactctttggaggactaattaatgaaagactagaattaaaatcatctcaaaaaagtgatgaaaaaaatgatgttctagacgtttgcttaagcattagcaaagagaaccctgatgagatcgacagaacacacatagaaaggatgtgtctcgacctgttcgttgccggtacggatactacatcatctacgttggaatgggctatggctgaagtcctaagaaatccagaaaccttggttaaagctaaagcggaattggaagaagttatcggcaagggtaagatcttggccgaagcagatgtatcgaacttgccatatctgaggtgtattgttaaggaaactcttagaatccatccgccagtaccattcctaattcctagaaaggtggaaatggatgtagaagcgtgtggttacactgtgcctaaaaatagtcaggtttttgttaatgtttgggcgataggaagagatcctactttatgggaagatcccctgagttttaaacctgaaagatttatggcatcggaattggacgtaaggggtcgtgacttcgagcttcttcctttcggagctggcaggagaatttgcccaggtctgccattggctatccgtatggttcccgtcatgctgggttctttagttaatagctttaactggaagttggatggtggtattgcccctaaggagttagatatgggtgagaaatttggtatcactttggcaaaagcacaaagtctcagagcagtcccatcaccactggtg

SEQ ID NO: 1068 - DNA, 1473 bp, Erythranthe guttata
atggacttcattacattggctctggtgctaatttttgtattaataattattcacgcaatccaaactatttcgacaagaggcaagaaacttcctccaggtccaacactgttacctctgattggaaatttgcatcttttgggcgaccaaccccataaatcactttgtcgattagccgaaacacatggtcccttgatgcgagtccgcttgggctttattaacacagtcgtcatatcttctgctgaaatggctaaggaagtcttacaaaagcatgatttagccttttcgtcaagatctgtaccgaacgcgttattggcacatgaccaattcaaatactccgcagtttggttacccgtcggccccagatggagatctttacgaaaggcattgaattcaaatatgctttcggttggtagacttgacttcggtcaaaacttgagatgcaggaaggtcgatgaattagtggagtattgtagaagatcaagtatttcgggtgaagccgttgatgttggacgagcggcttttagaaccagccttaatctactgtcgaatactatcttttctaaagatctaactgatcctttctcagattctgcaaaagaattgaaggatcttgtttggaatattatgttggaggccggtaaaccaaacttggtagatttcttccccattctaggtaagttagatccccagggaataagacgtagaatgactgtaaacttcggtaaggttattgatctgttatcaggattgattgatgagagaattgagcggggtaaatcggatcaaaatgccgatgttattgatgtattactggcggcatgtaaagagaatccagaagacattgaccgcacacatattgagaggatatgtttggacttgtttgctgccggtacagacacatcgtcgagtaccgtggaatgggctatggctgaggcactggctaactcagaaatcatgaaaaaggcgaaagcggaattggaagaagttgttggaaagggaaaggttatcgaggaggcagacataagtagactaccgtatttgcaatgcatggtaaaagagacattgaggttacacccgcctgtgccactgctcattcctagaagagtggaagatgacgttgacgtctgcggttacaccgttccaaaaaactcacaagttttagttaacgcttgggcaataggcagagatgcagggatatgggaaaaccccttagagttcaaacctgagagatttgtcgggtcggaggttgacgttaaaggccgggattttgaacttataccatttggaggtggtaggcgaatctgccctggtttacctttagcagttaaaatggtacccgtaatggtcggttctctattaaattctttcgattggaaaatagagtatagtggtatcggagaatttgacatggaagaaaaattcggtattactctacaaaaggcaagaccactattagcagtccccattccattg

SEQ ID NO: 1069 - DNA, 1482 bp, Picrorhiza kurrooa
atggactttctaactattatcctaggcttattgtttgcgattacattaatccatggttatcaactactttcaagtaaaggtaagagacttccgccgggccctacaccattgcctcttattggcagccttcatttgttgggcgatcagccgcatcagtcgctagccaaactggcaaaaaagcatggtgagctaatgtgtcttcgactaggttttattaatactatagtcatttcatcagctgctatggctaaagaagtccttcaaaaacaagatttggccttctcctctagaatgtcccctaatgcagtccatgcacatgaccaattcaaatattctgtggtttggttgccagtggcggcgaggtggagatccttaaggaaagtcctcaacagtaagatttttagcgggaacagaatggatgctaatcagcatttacgtggcaggaagagacaggagcttattgcttactgtagaaaaaggtctcaaacaggtggtgcaggtgatatgggtagggcccctttcagaaatccagtgaatcttgccgttgaacatgattttttcaagaggattgaggacccttactctgattccgccaaggagttcaaggatctggtttggaatataatgttggaagctggaaagcctaatttggttgatttttatccggttttagaaaaagtggatccacaagggatccggaaaagaatgactgtacattttggtaaagttatagaacttttttcaggcttgatcaacgaaagaactgagaaagggaaaacgcaagacgccggaactacggatgttatcgacgttctgttaaagatatctaaagaaaacccggatgaaatcgacaggacacacattgaaaggctgtgtctggatttatttgttgccggtacggatacaacgtcaaatacactagagtgggccatggcagaatcccttaagaatccagaaataatgaaaaaagccaaggctgaattagaacaagttattgggaaaggaaaagtgcttgatgaggctgacatccaacgtttaccttatctcaggtgcatggtcaaggagaccttaagaatccaccccccagtgcctttcctcatcccacggaaggtagaacaagatgttgaagtttgtggatatactgtacctaagaactctcaagtgtttgtaaacgcatgggccataggtcgggatgctgaaacctggccgaaccctctggaatttaaacccgaaagatttatggaatctgaagttgacatgagaggcagagattttgaattgattcctttcggtgcaggtaggagaatttgccctggattaccattagccctgagaatggtgcctgtaatgttgggttccctgttgaattcgttcgattggaagttagaaggtggtgctggtccaaaagaactggatatggaagaaaagtttggtattacactacaaaaagctttgccactaatggccgtgcctgttccgcta

SEQ ID NO: 1070 - DNA, 1482 bp, Olea europaea
atggatttcctaactatagttcttgggcttttgttcgccctgaccctaattcaagccttcagatccattagtactagagggaaaaatttgccaccgggccccacaccattacctattattggaaacttacatcttttgggtgatcaaccacacaaaagcttggcaaaactagcaaaaacttatggaccgataatgtgcttgagattcggatcaatcaatacagtagttattacgtcttcagccatggccaaagaagttcttcaaaaacaggatttagcattttctagtaggcatattccaaatgcaattcacgcccacaaccaattcaagtactctgtggtctggttaccagttgccagtacttggcgtagcctacgtaagatccttaattctaacatgttttcgggtaatagactagacgctaaccaacatttgagagttcgtaaagtacaggaattgataacttattgtaggaagaactctcaggcaggagaagctgttgatatagggagggcggcatttaggacgagtttaaatctactgagcaatactatattttcaaaggatttaacagatcctttttctgattcggctaaagaatttaaagatttagtctggaatgttatggttgaagcaggtaaaccgaaccttgtcgacttcttcccagttctagagaaattagatccacttggtattcgcagacgtatgacaattcactttggtaaaattattgaattatttgggggcctgataaatgaacgcctgaaaagacgtatgtcagacaactcaaagaatagtgatgttctagatgtcttacttgatactagccaagaaaaccctgaagagattgacagggttcacatcgaaagattatgtttggacctgttcgtcgccggaaccgacactacctcaagtacacttgaatgggccatggccgaaacgttaaaaaatcctgctaccatgaaaaaagccaaggctgaattggaggaggtaataggtaaaggtaaggttttagaagaagcagatgtatctaggttaccctatttaagatgtatggtcaaagaagccttgaggatacatccaccagttccattcttgatacctagacgagttgaacaagatgttgaagtttcaggttatacggttccaaaaaattctcaggtcctggtgaacgcatgggcaatcggccgggatccaacactttgggaaaacccattagaattcaagccagaaagattcatggaaagtgagttggatatacgcggtagagacttcgagttaattcctttcggggcaggccgtaggatttgtcctggtttaccattggcaatccgaatggtccctgttatgctaggcagtttagttaactcttttgactggaaactagaaggcgggatttctcctaaagatttagacatggaggaaaaatttgggattaccctccagaaggccaatcctttgcgggccgttccaacaccttta

SEQ ID NO: 1071 - DNA, 1479 bp, Gentiana rigescens
atggattacttgacaattgcattggggttccttttcgctttaaccttatatcaggctttgatatctttcagcagaaaatcaaagaaccttccacctggacccgcccccttgcctttcatcggaaatttgcacctcctaggtgatcagccccataagtcattggcaaagcttgctaagaaacacggtccaattatggggctacaatttggacaggtgactactatagtggttacttctagtggcatggccaaagaagttttacagaaacaggatctggctttctccagtaggtccgttcctaatgcattacatgctcacgatcaatataaatactcagtgatttggttaccagtagcatcgcaatggagatcattacgtaaagttttgaattctaatattttttcaggtaatagattggatgcaaatcagcacctaagatgccgaaaagtacaggaactaatcgcttactgtagaaaaaactgccaaactggtgaagcagttgatttgggaagggctgctttcaggacgtctctcaatttgttgtctaacactatcttttctaaagatttaactgatccatattccgacagtgcaaaagaatttaaagatcttgtttggaatgttatggtagaagccggaaagccaaatcttgtggatttttttccagtccttgacaaggtcgatccccaaggaataagaaaaagaatgacctttcactttggaaaaatattgcaacttttcggaggtttaataaacgagcgattacaacagaacaaagccaagggagctcataaggacgtattggacgtcctgttgaagacgagccaagaaacaccagacgagttgaatagaacacacatagagagaatgtgtttggacttgtttgtggccggtactgatacaactagtagtactctagagtgggccatggcagaaatgttaaagtcgccggacaaaatgaacaaggcaaaggaagaattggcacaggtaataggcaaaggaaaagctgtcgaagaggcagatattgcttcacttccatatcttagatgcgctattaaagagacgttgagaattcatcctcctgttccatttctaattccccgacgtactgaacaagaagttgaagtttgtggttacacagtgccgaaaaatagccaagtatttgtcaacgtctgggctattggaagagatgaaactacctggcctgacgcgttggagtttaaacctgaacgctttttagaatccgaaattgatatgagaggtagggattttgaattactgccatttggggcaggccgtagaatctgtccaggattccctctagctgttaggatggtcccggtaatgttgggtagcttgctaaattcattcgattggaaattagaggggggtatcgccccaaaagatcttgatatggaggaaaaatttggtattacattacaaaaagctcacccattacgagcaattcctacttcatta

SEQ ID NO: 1072 - DNA, 1476 bp, Nepeta cataria
atggattttctgacaattttcattggtcctcttctggcaatcattgcattgttctacgctcgcttaacaattagcactcgtggaaagaatctacccccaggtcccactcctttaccatttattggtaatttacacttgctcggtcatcatccccataagtctttggcacgtcttgccaagacttatggtccattgatgttacttagactagggtctgaaaatactgtggtcgtatcttcggctgccgttgctaaagaagtattgcaaaaacatgatttggcctttagttctcgatccatacctgatgcagttcatgcacacgatcaattcaagtactccgtggtttggttgccagttgcctctagatggagatctttaagaaaaactatgaactccaatatcttttcgggctcctgcttagatgccaatcagcatttaagaagtaggaaggttgaagaattaatcgcctattgtaaagaaagctgtaggcgtgctgaagcagtagacgtcgggcgtgctgctttcagaaccgctttaaattctttgtcaaacacaattttttctcgagaccttgctgatccattatccgactctggtaaggaatttaaggacgttgtttcttcgatcatgatggaggcgggcaagccaaacagtgtagactactatccgttcctgtctcgattcgatccccaaggaatccgtagaaggaccgcaatctattttgataaactgattaacatcttcaagggtttgattgacgaacgtctcgaaaaaagaaggtcgcagtacgaagaggctacggatgtaatcgatatattacttaacactattgaacagaacccagaagaaatcgaccgaactcatatcgagagaatgttcttagatctctttttggctggtacagatacgacatcttcgacggtcgaatgggccatggctgaagccatgaagaacccagaaaccatgaagaaagctaaggcggaattagctcaagttatcggcaaggggaaaatagtccaagaaactgatataccacacctaccatatttgcaatgcatcgtaaaggagacactacgattacacccacctgtacccttccttatcccacgtcgtgttcatgaagacgtggacatattgggttatgtcgttccaaataactcacaagtgttcgttaacatgtgggccattgggagggacccagatatgtggaaaaatccattacaatttgatcccgaccgttttcatgattccgaagtcggtctgagaggtaaagattttgaattgattcccttcggcgctggcagaagaatttgcccaggattacctttggctatgcgtatggtgcctgttgttttaggatctctcttgaactccttcgattggaaggtcgaaggtggtaaagaactggaaatgaatgaaaagtttggaataactcttgaaaaagcacaacctttaatggcagtacccatcgcatta

SEQ ID NO: 1073 - DNA, 2064 bp, Arabidopsis thaliana
atgacttcagctctctatgctagcgatttatttaaacaattgaagtctatcatgggtacagatagcttaagtgatgatgtagttctagtaatcgcaacaacgagtttggccttagttgctggttttgtcgttctcttgtggaaaaaaacgactgcagacagatcaggtgagttgaaaccactgatgattccaaaatctctgatggctaaagacgaagatgatgacttggatcttggctctggcaagacaagagtttctatcttttttggtacacaaactggtacggctgaagggttcgccaaagccttaagtgaagaaattaaagcaaggtatgaaaaggcggccgtgaaagatgactacgctgcagatgatgaccaatacgaagaaaagctcaaaaaagagactcttgcttttttctgcgttgctacgtacggtgatggagaaccaacagacaacgccgcgagattttataaatggtttactgaagaaaatgaaagagacattaagcttcagcagctagcatacggagttttcgctctcggtaatagacagtatgaacattttaacaagattggaatagtcctagatgaggaattgtgcaaaaaaggagctaagagactgattgaagttggattgggtgatgatgatcagtcaattgaagatgattttaatgcgtggaaagagtcgttgtggagcgaattagataagctactgaaggatgaagatgataaatctgtggctacaccctacaccgccgttatcccagagtacagggtagttacccatgatcctagatttacaactcaaaaatccatggagagtaatgtggcaaacggaaataccactatcgatatccatcatccctgtcgtgtagacgttgctgtgcagaaagagttacacactcatgaatctgatagatcttgtattcacttggagttcgacatttcgagaacaggtataacatacgaaactggggatcacgtcggtgtttatgccgaaaatcatgttgagatcgttgaagaagccggtaaacttttgggtcacagtttggaccttgttttttcaattcacgccgataaagaggacggctcacctttagaatctgcagtgccccccccctttccggggccatgtacgcttggcacaggtctagcgagatacgcagatcttctcaatccacctagaaagtcagctctcgttgcattagcagcttatgcaactgaaccgtctgaggccgagaagttgaagcacttgacctctccggatggtaaagatgagtatagtcagtggattgtagcatctcagagaagtttattggaggtcatggctgcttttccaagcgctaagcctcctctaggtgtctttttcgctgctatcgctcctaggctacagccgagatattacagcatatcatcctctccaagattggctccatcgcgcgtacacgtgacttccgctctggtatatggaccaaccccaaccggtagaattcacaaaggtgtctgctcaacatggatgaaaaacgcagtgccagccgagaagtcacatgagtgtagtggtgctccaatattcataagagcctctaatttcaaacttccaagcaatccgtctacaccaatcgtcatggttggtcccggaacaggtttggctccatttaggggatttctacaagagaggatggcattaaaagaagatggtgaagaattagggagctcgttgttatttttcggatgccgaaatcgtcaaatggacttcatttacgaagatgaattgaacaactttgttgaccaaggtgttatttcagagctaataatggcgttcagtagagaaggagcacaaaaagaatacgtccaacataaaatgatggaaaaagctgcccaagtttgggatttgattaaagaagaaggttatttatatgtgtgtggagatgctaaaggtatggcaagagatgttcataggacacttcatactatagttcaggaacaagaaggcgtatcgagtagcgaggcggaggctatagttaaaaaattgcaaacagagggtcgttacctgagagatgtgtgg

SEQ ID NO: 1074 - DNA, 2142 bp, Catharanthus roseus
atggattctagttcagaaaagttatcaccatttgaattaatgagcgcaattttgaagggagctaagctagatgggtcgaattcgtccgattcaggtgtggcagtttcaccggcagtaatggccatgttgctagagaataaagagctggtcatgattttgactacttccgtggcagtgttgattggttgcgttgttgtgctcatatggagacggtcctccggatctggtaaaaaggttgttgaaccacctaaactaatcgtgccaaaaagtgttgtcgaaccagaggaaatcgatgaaggtaagaaaaagtttactatattttttggcacccagacaggtacggctgagggcttcgcaaaggcactagccgaggaagctaaagctaggtatgaaaaggcagtcattaaggttatcgatatagacgattatgcggctgatgacgaggaatatgaagaaaaatttaggaaggaaacgttagcttttttcattctggctacttacggcgatggtgaaccaacagacaatgcagccagattctacaagtggtttgttgaagggaatgacaggggtgattggttaaaaaatttgcaatacggtgtttttggcctcgggaatcgccagtacgaacatttcaataagatagccaaagtggtagatgagaaggttgcggaacaaggtggcaaacgtatcgtccccttagttttaggcgatgacgatcagtgtattgaagacgatttcgcggcatggcgtgaaaatgtttggcccgaacttgataatcttcttagagacgaagacgatactactgtttcaacaacctacacggccgcaatccccgaatacagagttgttttcccagataagtcagatagcttaatttcagaagcaaatggtcacgctaatggttatgctaatgggaatacggtctacgatgctcaacacccatgcagatctaatgttgcagtccgcaaggagttacacactccagcatcagatcgctcatgtactcatcttgatttcgatatcgctggcaccggattgagctacgggactggagatcatgtaggtgtctattgtgataatttatctgaaaccgtcgaggaagctgagaggttgcttaatctgccgcctgaaacgtattttagcctccacgctgataaggaagacggcacacctttggcaggatcttctttgcctcctccctttccaccttgtacattacggactgctttgactaggtatgcggatttgctgaacacccccaaaaagagcgctttgctggccttagctgcatatgcttccgatcctaatgaagccgatagactaaaatacctagccagtcccgctggcaaggacgagtacgcacaatctcttgtcgctaaccaaagatcgcttttagaggtaatggccgagtttccctctgcaaaaccaccacttggggtttttttcgcggctattgctcctcgtcttcaaccaaggttctattcaatttcctctagtccgcgtatggctcctagtagaatccatgttacatgtgcattagtctacgaaaagactccaggtggtagaattcataagggagtttgttctacttggatgaaaaatgctattccgctggaagaatcacgtgactgctcgtgggcccccatctttgtacgtcaaagtaattttaagcttcctgcagaccctaaggtgccagtgataatgataggtccaggtaccggcttggctcctttcagaggattcttacaggaaaggttagctttgaaggaagaaggcgcagaattgggtactgctgtgttcttctttggttgtcgtaacagaaaaatggactacatttacgaagatgagctaaaccatttcttagaaattggtgccttgtccgaactattagtcgccttcagcagggagggccctacgaagcaatacgttcagcataaaatggctgaaaaagcgtcagacatttggcgaatgataagtgatggtgcctatgtgtatgtgtgcggggatgcaaagggtatggctcgtgatgtccacagaacactacatactatcgcccaagagcaaggctcgatggattctacacaagctgaaggttttgtaaagaatctacaaatgacgggtaggtacctaagagatgtttgg

SEQ ID NO: 1075 - DNA, 2142 bp, Catharanthus roseus
atggatagctcctcagagaagttatcaccatttgaactgatgagcgcgattctaaaaggagcaaaattagacggaagtaatagctccgactcaggtgtggctgtaagccccgccgtcatggctatgctattggagaacaaagagttagtgatgatactaaccaccagcgtagctgttcttattggctgcgtagtggttttaatctggagaaggtcaagcggatctggaaagaaagttgtggaaccgccgaagctgatcgtacctaaatccgttgtcgagccggaggagattgacgaaggcaaaaagaaatttacaattttttttggaacacagacagggacagcagaagggtttgccaaagccttggcagaggaagcgaaggctcgttatgaaaaagcagtaataaaggtcatcgatatagatgattacgctgccgacgatgaagaatatgaggagaaattccgtaaagaaacgctggccttctttatattggcgacgtatggagacggggagccaactgataacgctgcaagattctataaatggttcgtcgaaggcaacgataggggagattggctgaaaaatttgcagtacggagtattcggtctaggcaatcgtcagtatgaacacttcaacaagatagctaaagtcgttgacgaaaaggtggcggaacagggtggtaagagaatagtccccttggtccttggagacgatgatcagtgtatcgaagacgactttgcggcatggcgtgagaacgtttggccggagttggataatttacttcgtgacgaggatgatacgaccgtgagcacaacatatacggctgcgataccagagtatagagtggtctttccggacaagtctgatagcttaatctctgaggcgaatggtcacgcaaatggatatgcaaatggaaatacggtttacgacgctcagcatccgtgtcgttccaacgtagcggtacgtaaagagctacacactcctgcttctgacagaagctgtacgcacctagacttcgacatcgcaggtaccggcctatcatatggcactggcgatcacgtcggggtctattgtgacaacttgtccgagaccgtggaagaagcggaaagattactaaacttgccacctgagacatatttttccctgcacgctgataaggaagatggcacacccttggctggatcatcattacctcccccttttcctccatgcaccttgaggacggcactaacccgttatgcggatttactgaacacacctaaaaagtcagcgttattggcattagccgcgtacgcaagtgacccgaacgaggcggatagactgaaatatttggccagcccagcaggtaaagatgagtatgcacaaagtttggtcgcaaaccagagatctttacttgaagttatggctgaattcccgtccgctaaaccccccttaggtgtcttttttgctgccatagcaccaaggctacaaccgagattctactccatatctagttccccacgtatggcaccgtccaggattcacgtgacctgtgcgttagtttatgagaaaaccccgggaggaaggatacacaaaggagtctgcagtacgtggatgaagaatgcaattccgttagaagagtctagagattgctcttgggctcctatattcgtaaggcagtctaactttaaattacccgctgatcccaaagttccagttatcatgatcggtccggggacaggtttggctccattccgtggttttcttcaagagagactggcgcttaaagaagaaggagcagaactaggcacggcagtattctttttcgggtgtagaaacaggaagatggactatatatacgaggacgagctaaatcactttttagaaatcggcgcgttatcagaactactagttgcgtttagccgtgaaggtcccacgaaacagtatgtgcagcacaagatggcggagaaggcttccgatatatggcgtatgatttccgacggagcatatgtctatgtctgtggcgacgctaaggggatggcccgtgatgtccaccgtactctacatacaatagcacaggaacagggttctatggactcaactcaagctgagggatttgtcaagaatttacaaatgactgggcgttacctaagggatgtctgg

SEQ ID NO: 1076 - DNA, 2064 bp, Arabidopsis thaliana
atgacgagcgcgctgtacgcgtcagacctttttaagcagttaaaatccataatgggcacagactctttgtctgatgatgtggtattggtaatagccaccactagcttggcactggtcgccggctttgtagtattactgtggaagaaaactactgcagacagaagtggtgagcttaagcccctgatgattccgaaatcactgatggcaaaagatgaggacgacgacttagatctagggtcaggcaaaactagagtatcaatcttctttgggacacaaacagggaccgctgaagggttcgcgaaggcgttgtctgaggaaataaaggcaaggtacgaaaaggctgcggtaaaagatgattacgcagcagatgatgaccagtatgaggaaaaattgaagaaggaaacccttgcttttttttgtgtagctacttatggagatggcgaaccgactgataatgccgcgaggttttacaagtggtttactgaggagaacgaacgtgatatcaagttacaacagctggcgtatggagtctttgctcttggtaatagacaatatgaacactttaacaaaatcggaattgttttagacgaggaactttgtaagaagggcgccaagagattgatagaggttgggctaggcgatgacgaccagtccatagaagatgattttaatgcatggaaggagagtttatggtctgaacttgacaaactactaaaagatgaggatgataagtcagtcgccaccccttatactgctgtaatacctgagtacagagtcgtaacacatgacccaaggttcactactcagaaatcaatggagtccaatgtggcgaacggtaacactactattgatattcaccatccatgtagagtggatgtcgcggtacaaaaagaattgcatacacacgaatctgatagatcttgtattcacctggagtttgatatatcaagaacagggatcacctatgagacaggagaccacgttggggtgtatgccgagaaccacgtagaaattgtcgaagaagctgggaagttattgggacactcactagatctggtttttagtattcacgcggacaaagaagacggctctccattagaatcagcggtgccaccaccattccctggaccatgtacgttaggcacggggttagccaggtatgctgatttactgaatcctcctagaaaatccgcgctagttgccctggctgcatatgctacggaaccgtcagaagccgagaaactaaaacatttgaccagtccggatggaaaggatgagtacagtcagtggatcgtcgccagccagcgtagcttattggaagtaatggcagcctttccatccgcgaagccgcctttaggtgtatttttcgccgcaatagctcccagacttcagcctcgttactacagcatctccagttctccaagattggcgccctcccgtgtacacgttacgtccgcattggtttacgggccaacaccgacggggaggattcataaaggagtctgctctacgtggatgaaaaatgcagtgccggctgagaagagtcatgaatgctcaggggccccgatcttcatcagagcgtctaatttcaaactaccttcaaatccgtccactcccatcgttatggtagggccagggacaggattagcgccttttagaggattcctacaggaaagaatggcgttaaaggaggacggagaggagttgggctcctctttactattcttcggttgccgtaacaggcagatggacttcatctatgaggacgagttaaataactttgttgaccaaggtgttatctcagagttgataatggcatttagtagggagggagcccagaaagagtatgtacaacataaaatgatggagaaagcagctcaagtttgggatctaattaaggaggaggggtatttgtatgtttgcggcgatgcgaagggcatggcaagggacgttcatagaacgcttcataccatcgttcaagaacaagaaggcgtctcaagtagtgaggcggaggcaatcgtgaagaaactacaaaccgagggacgttatcttcgtgatgtgtgg

SEQ ID NO: 1077 - DNA, 2142 bp, Catharanthus roseus
atggactccagcagtgagaaattgtcccctttcgaactaatgtcagccatcttgaaaggtgcaaagctagatggttctaattcctcggacagcggcgtagctgtctcacctgcagtaatggctatgcttctagaaaataaagaattggtcatgattttaactacatcagttgctgtattaataggatgcgttgtggttctaatatggagaagatcttctggttctggcaaaaaagtcgtcgagccaccgaagctgatcgttcctaaatctgttgttgagcctgaagaaattgatgaaggtaaaaaaaaatttactatcttctttggaactcagacaggtacagccgagggtttcgctaaggcacttgctgaagaagcaaaagcgcgatacgaaaaagcagtaatcaaggttattgatattgatgattacgcagcagatgatgaagagtacgaggaaaaattccgtaaagagactttagcgttctttattctcgctacgtacggtgatggagaaccaacagataatgccgccaggttttataagtggtttgttgaaggtaatgatcgcggtgattggctcaaaaacctacaatatggtgtatttggattgggtaataggcaatacgagcattttaacaaaattgcgaaggtcgttgatgaaaaggttgcagaacaaggtggtaaaaggatcgtacctttggttttaggagatgacgatcagtgcatagaagatgatttcgctgcatggagagaaaacgtatggcctgaattggataatttgttacgagatgaagatgatactaccgttagtaccacttacactgccgctataccagagtaccgagttgtcttccctgataaaagtgattcattaattagtgaagcaaatggtcacgcaaatggctatgccaatggtaatactgtttacgatgcgcaacatccctgtagatctaatgttgctgtgagaaaagaattgcacacgccagcatcggatagatcttgcacacatctcgacttcgatattgcaggaactggtctaagttatggtactggtgaccacgtaggcgtttactgtgataatttatcggagactgttgaagaagctgaaagactccttaatttgccgcccgaaacatactttagcttacatgcagacaaggaggatggtacccctttagctggttcatcattgcctccaccttttcccccatgcacattgcgtactgctctcacacgctacgcagacctcttgaacaccccaaaaaaaagcgctttgttggcattagccgcctatgctagtgacccaaacgaagcagacagacttaaatacttggcttcgcctgcaggtaaagatgaatacgctcagtcactcgtagccaatcaaagatccctattggaagtcatggcggaatttccatcggctaagccgccattaggcgttttttttgcagccattgccccgcgcttacaacccagattttactctatctcgtcgtctccaaggatggctccatcacgtatccatgttacttgtgcattagtgtatgaaaaaactccaggaggccgtattcacaagggtgtttgtagcacttggatgaagaatgccattcctttagaagaatccagagactgttcatgggctccgattttcgtaaggcagagtaatttcaaactccctgctgatcccaaggtaccagtcataatgatcggtcctgggacaggtttggctccttttcgcggctttctacaagaaagactggctcttaaggaagagggagcagaattgggtactgccgtgttcttctttgggtgtcgtaatagaaaaatggactacatttacgaagatgaattaaaccactttttagaaataggagctttgtctgaactattagtcgccttttcacgtgaagggccaaccaagcaatatgttcaacacaagatggcggaaaaagcgtcagacatatggcgaatgattagtgacggtgcctatgtttacgtctgtggagatgctaagggaatggcaagggatgttcatcgtacacttcacactatcgcacaagagcagggatcgatggattctactcaagctgaaggtttcgtaaaaaatttgcaaatgactggaagatatctacgagatgtatgg

SEQ ID NO: 1078 - DNA, 2064 bp, Arabidopsis thaliana
atgacttctgccttgtacgcttccgatctatttaagcaattgaaatcgattatgggtactgactctttgtccgacgatgtcgtactagttattgcaactacttctttggctttggtggctggttttgttgtcttgttgtggaagaaaaccacagctgatcgctcaggcgagttaaaaccattaatgattcccaaatcactgatggcaaaggatgaagacgatgatttggacctagggtcaggtaagacaagggtgtccatcttctttggaactcaaacgggtactgctgaggggttcgcaaaggctctatcggaagaaataaaagctaggtacgaaaaagcagccgtcaaagacgattacgccgctgatgatgaccaatacgaagaaaaattgaaaaaagaaacattagccttcttctgcgtcgcaacttatggtgacggcgaaccaacagataatgcggctagattctacaaatggttcacggaagagaatgagagagatattaaattgcaacaactggcttacggtgtttttgcacttggaaacaggcagtacgaacattttaacaagattggaattgttttggatgaggagttgtgtaaaaagggagctaagagattgatagaagtgggcttgggagatgatgatcagtcaattgaggatgatttcaacgcatggaaggaaagcttgtggtctgagttggataagctccttaaggatgaagatgataaatcggtcgcgaccccttatactgctgtcataccggaatacagggtggtaactcatgaccctaggtttactacacagaagagtatggaatccaatgtggcgaatggtaacaccacaattgatatccatcatccatgtagagttgatgtggctgtccagaaagaattgcatacccatgaatcggacaggtcatgtattcatttggaattcgacatttcacgtacaggtattacttatgaaactggcgatcacgtgggcgtctacgctgagaatcacgtcgaaattgttgaggaagcaggaaaattgctgggacattcactagaccttgttttttcgatacatgcagataaggaagatggaagtccgttggaatctgcagtccctcctcctttcccaggaccatgtaccttgggtactggtttggccagatatgcagatctccttaatcctccccggaaaagcgcattggtggctttggctgcctatgcaactgaaccttcagaagctgaaaaacttaaacatctaacatccccagatggaaaggacgaatatagtcagtggatcgtggcgagtcaacgctcacttttagaagttatggcggcatttccaagcgctaaaccaccactgggtgttttctttgccgcaatagctcctagattacaacccagatattactctatctcatcctctccacgattagctccttctagagttcacgtcacttctgctttggtctacggtccaacgccaacaggtcgaattcataaaggtgtatgcagtacatggatgaagaatgctgttcctgctgagaaatcgcacgaatgttccggtgcccctatttttatcagagccagcaacttcaaattgccatctaatccgtctactcccattgttatggtaggtccgggtactggccttgccccgttcagaggttttttgcaagagcgaatggccttgaaggaagacggggaagagttaggttcttccctattatttttcggctgccggaatcgacaaatggactttatttatgaagatgaattgaacaactttgtggatcaaggagttatttccgaattgattatggcgttctctagagaaggtgcacaaaaagaatacgtccaacataaaatgatggaaaaggcagctcaagtatgggatctaattaaagaagaaggatatttatacgtatgtggggatgcaaaaggtatggccagagatgttcataggactttgcacactatcgtccaagaacaagaaggtgtctcatctagtgaagctgaagcgattgttaaaaaattacaaacagaaggcagatatttgagggatgtttgg

SEQ ID NO: 1079 - DNA, 2142 bp, Catharanthus roseus
atggattcctcctcggagaagctatcgcccttcgagctgatgtctgccatccttaagggtgccaagctcgatggaagcaactcttccgactctggcgtagccgtatcccccgctgtgatggccatgctgctagagaacaaggagctggtcatgatcctgactacatcagtggccgtgctcatcgggtgcgtcgtcgttctgatttggcgacgaagctctggatcaggaaagaaggtcgtcgagccgcctaagctgatcgtcccgaaatctgtcgtggaaccggaggagattgatgagggcaagaagaagttcacaatattctttggcacacagaccggaacggccgagggattcgccaaggcgctggcggaagaggctaaggcgcgatacgagaaggctgtgatcaaggtgatagatattgacgattacgctgctgatgacgaggaatacgaggaaaagttccgtaaagagacattggcttttttcatacttgctacctatggtgacggcgagcctaccgataacgccgcccgattttacaagtggtttgtcgagggcaacgaccgaggcgactggttgaagaacctccaatacggcgtgttcggactgggcaaccgacagtacgagcatttcaacaagattgcaaaggtcgttgacgagaaggttgcggagcagggcggcaagaggatcgtgccactggtccttggagacgatgaccagtgtatcgaggacgacttcgccgcttggcgtgagaacgtttggcccgagcttgacaaccttctacgagatgaagatgatacaacagtctcgacgacgtacacagccgctattcctgaatatcgcgttgtgtttccagataagtctgattcccttatcagcgaggcaaacggacacgccaatggctacgctaacggcaacacggtgtacgatgcgcagcatccctgtaggagtaacgttgcagtgcgaaaggagctgcatacacccgcttcagaccgatcttgcacccacttggatttcgacattgccggaaccgggctgtcatacggcaccggagaccacgttggtgtatactgtgacaacctatccgaaacagtggaggaggctgagagactgttaaatctgccccctgagacttacttttcgctgcacgccgacaaggaagacggaactccgctcgccggttcttccctccccccccctttccccccttgcactctacggacggccctgacgcgatacgccgaccttcttaacacccctaaaaagtcagccctactggctttggccgcctatgcatccgatcccaacgaggctgaccgattaaagtacctcgcgtcccccgctggcaaagatgagtacgcacaatccctagttgccaaccagcgaagtttgctagaggtgatggccgaattcccctccgctaaacccccactgggcgttttcttcgcagccatcgcacctcgcttacagcctagattctacagcatctcctcgtcgccgcggatggccccttcgcgaatccacgttacgtgcgctctggtctacgagaagacccccggtggtcgaattcacaagggtgtctgctcgacttggatgaagaacgccattccgttggaggaatctcgagattgcagttgggctcctatcttcgtccgacaatccaacttcaagttacccgctgatcctaaggtgcccgtcattatgatcggtcccggcaccggacttgctccctttcgaggtttcctgcaggagcgccttgccctgaaggaagagggcgccgagctcgggactgccgtcttcttctttggttgtagaaaccgaaagatggactacatctacgaagacgagctcaatcatttcctcgaaattggagcactatcggagcttcttgtcgcattttcaagagagggacctaccaagcagtatgttcagcataagatggcagagaaggcctctgatatctggagaatgatcagtgacggagcctacgtttacgtttgcggagatgccaagggtatggcccgagacgttcatcgaactcttcacaccattgcccaggaacaggggagcatggactctacccaggctgagggattcgttaagaacctccagatgacgggccgctatctgcgcgatgtgtgg

SEQ ID NO: 1080 - DNA, 2136 bp, Nepeta mussinii
atggattctaccacagagaagctgtctccttttgaccttatggccgctattctcaaaggagtcaagctggacaactcgaacggttccgcagagacatcgcagcctgccgtggtggccatgttgatggagaacaaggaccttatgatgatgctgaccactgccgtggctgtcctgcttggatgtgtggtgtatcttgtgtggcgcaagggtgctggatcggctaaaaaggtggtcgagccccccaagctggtgctcccaaaggcactctctgagacagaggaagtggatgatggaaagaagaaggtcacaattttcttcggaactcaaaccggaacggctgagggattcgccaaggccctggcagaggaggccaaagcccggtaccctcaggctaacttcaaggtcgttgacatggacgactacgctgccgaagacgaggagtatgaggaaaagttgactaaggagactatggccttcttctttctagccacgtacggagatggggagcccacagacaacgccgcccgattttacaagtggttcgctgagggcaaggaacggggtgactctttcaagaaccttcactatggtgtgtttgggcttggaaaccggcagtacgagcacttcaacaagattgccattgtcgtcgacaacatcttggccgagcagggtggaaagcgactggtgcccgtgggactcggtgacgacgaccagtgtattgaggatgatttcgctgcctggcgggagaacgtgtggcctgagctggacaacttgctccgaaacgaagatgacgccagtacagtgtccactccttacactgctgcagtcctggagtatagagtggagtttcacgaccagtcggatgagttgtcgctcgaaaactccctcgccaatggccatgctaacggcaacgcctcctacgacgctcagcacccatgccgggccaacgtcgctgtgaagcgagagctgcacacccccttgtctgaccgatcttgcacacacttggagttcgacatttctggaaccgggctccaatacgagaccggggaccatgtcggtgtttactgcgagaacctgatcgaaacggtggaagaggcggagcgactgctaggactctctccccagacttacttctcggttcacacagacaaggaggatggcactcctctgggtggcagtgcgctccccccaccgttccccccctgtacgctacgtacagccctttcccgatacgcggatctgctgaatgctccgaagaagagcgccctgacagcccttgctgcttacgcatcggaccctaccgaggccgaccgtctgaagcacttggcatcgccggccggaaaggaggaatacgcccagtacgttgtggcctctcaaagaacgctgctggaagtaatggccgactttcctagcgccaagccccctcttggtgttttcttcgctggtgttgcaccccgtctgcaacctaggttctatagtatctcctcctcaccaaagatcgcgccctttcgaattcatgtcacctgtgcgttggtatacgataagacccctactggccgaattcacaaggggatttgctccacctggatcaagaacgctgtcccccttgaggaatcatctgattgctcgtctgcccctatcttcgttcgtaattccaacttcaagctcccttcggatgccaacattcctatcatcatgattggcccgggaacaggtcttgcccctttccgaggattcctgcaggaacgtttggcccttaaggagagcggagctgagttgggccctgcaattcttttttttggatgtcgcaatcgaaagatggatttcatctacgaggacgagctgaacgattttgttaaagcgggcgtagttagtgagctgatagtggcttttagtcgagaaggaagtaccaaggagtacgtgcagcataagatggcacaaagagcttctgacgtttggaagatgatttccgacggcggctatatctatgtctgcggggatgctaagggtatggccagagacgtccaccgaacccttcacaccattgcccaagagcagggatctatgtcttcctcggaggccgaaggtatggttaagaaccttcagatgactggacgatacttgagagacgtgtgg

SEQ ID NO: 1081 - DNA, 2076 bp, Camptotheca acuminata
atgagctcggattctgagctgatccgatggttcgaatccatcttcggtgtctcgttgggcagcaactccgtttccgattccgttgctatgtttgtgactacatctgttgccgtgatcatcgggcttctgttcttcctctggcgacgttcgagcgatcgttctaaggagtcaaaccccgtggtggtgccacgtcccttacttgtggaggcagaggaggatgaggtcgaggtgggatccgggaagactaagctgaccattttttatggaacacagacaggcacagcagagggattcgcaaaggcactcgccgaggagatcaaggccagatacgagaaggctgtagtgaaggtggttgacctggacgactacgctgatgacgatgagcagtatgaggaaaagcttaagaaggaaaccctggcgttcttcatggtggctacctacggtgacggtgagcctaccgataacgcagcccggttctataagtggtttactgacggtaaggagagaggcctgtggcttcaacaactcaagttcggcgtgttcggtctgggtaaccgacaatacgagcacttcaataagatcggcaaagtgctggaccaggacctctctgagcagggcggtaagcgtctcatccccgtgggactgggtgatgacgaccagtgcatagaggatgactttgctgcctggcgcgaactactgtggcctgaactggatcagctgctgagggacggcgacgacaccaataccgtttcgaccccttacaccgcagtaatccccgagtatcgggtcgtgatttacgacccgacaactacatcctttgaggacaagcacctcagcatggcaaacggaaacgcgtcttacgacattcatcatccttgccgagtgaacgttgcagtgcagagagagctccataaacctgaatctgacagatcctgcatccacctcgagtttgatatctcttccactggcattacatatgagacaggagatcacgtgggtgtttacgctgataactgtgatgagaccgtggaggaggctgcacggctcctgggtcagccgctcgatctactattctccatccacagcgatgacgacaacggtacccctctcggcggttctttgccccccccttttcccggaccttgcacactgagaactgccctcgccagatacgccgacctccttaaccccccccgtaaggccgcccttatcgccctggccgcacatgcgatcgaaccctccgaatccgagaagctgaagtttctgtcctctcctcagggaaaggacgactactcgcagtgggtcgtgggaagccagagaagccttctggaggtaatggcagagtttccaagcgccaagcctcccctgggagtcttcttcgccgccgtcgccacccggctccagccccgttattactctatttctagtagcccgagatttgcccccagccgagtgcacgttacatgtagcctcgtatacggacctacttcgacaggccgaatccacaagggtgtgtgtagcacctggatgaagaacgccgtgcctctcgagaagtctcgaaactgctcttgggcccccatatttattcgagccagcaatttcaagctgcccagtaacccctcaattcccatcgtgatggtcggccccggcacagggcttgcaccattccgaggatttctccaggagcgactcgctcttaaggaggatggaatccagctgggacccgcacttctgttttttggctgcaggaaccggagaatggatttcatctacgaggacgagctcaacaacttcgtagaccgaggtgtcctctctgatcttattgtggccttttcccgagaagggcctcaaaaggaatacgttcagcacaagatgatggaaaaggccgcatacatttggaacctcatttcccaggagggctatctatacgtctgcggcgacgcgaaaggcatggctagggatgtgcaccgaacgctgcacacaatcgttcaggagcaggagaatgctgatacctccaaggctgagtcggtagttaagaagctgcaaatggacggccgatacctgcgagacgtgtgg

SEQ ID NO: 1082 - DNA, 2136 bp, Arabidopsis thaliana
atgagcagcagttcgtcttcctctacatccatgatcgatctgatggccgctattatcaagggcgaaccggttatagtgtcggaccccgcgaatgctagcgcttatgagtctgtcgcggctgagctcagctctatgttaatcgagaaccgacaattcgccatgattgtcacaacatctattgccgtccttatcggctgtattgtcatgcttgtatggcgacgaagcggatcaggcaacagcaagcgtgtggagcctctgaagccactagttatcaagccccgcgaggaggagattgatgatggcagaaaaaaggtcactatctttttcggcacgcagaccggaacggccgagggattcgctaaggccctcggtgaggaggcgaaggcccgatacgaaaagacccgtttcaagatcgtggatcttgacgactacgccgcagacgatgacgagtacgaagaaaagctcaagaaagaggacgtggccttcttcttcctcgcaacctacggcgatggtgagccgactgataacgcagcccgattttacaagtggttcaccgagggcaacgatcgcggcgagtggcttaagaacctgaaatacggtgtcttcggactcggaaaccggcagtacgaacactttaataaagttgccaaggtcgtcgacgacatcctcgtggagcagggtgcacagcggctggttcaggtgggcctgggagatgatgatcagtgcatcgaggacgactttaccgcgtggcgagaggctctgtggccggagctggacaccattctgcgggaggagggtgacactgccgtggctacgccctacaccgccgctgtccttgaataccgggtgagcattcatgacagcgaagacgccaagtttaatgacatcactctcgccaacggtaacggctacacagtgtttgacgcccagcatccctataaagctaacgtcgctgtaaagcgggaactgcacactccagagtccgatcgttcttgtattcacctggagttcgatatcgcgggaagcggcctgactatgaagctaggagaccatgtcggggttctttgtgataacctctctgagaccgtcgacgaagccctacgactacttgacatgtctccagatacttacttctcgttgcacgcggagaaggaagacggaactcccatttcctcctccctgcctccccctttccctccgtgcaaccttcgcaccgctctcaccagatatgcctgtttgttgagttctccaaagaagtccgccctggtagctctagcagcccacgcctcggaccccactgaggccgagcgcctgaagcacttggcgtcccctgctggtaaggacgagtactctaagtgggtggtcgagtcccagcggtctctcctcgaggtgatggctgagttcccttcggccaaaccccccctcggagtgttcttcgccggtgtggcaccccgattgcagccgagattttactccatctcctcttcgcccaagattgcagaaacccgtatccatgtcacctgtgcgttggtgtacgagaagatgcctaccggtcgtatccataaaggggtgtgctctacctggatgaagaatgctgtcccttacgagaagtccgagaagctcttcctgggtcgccccattttcgtgcgacagtctaactttaagctgccctccgattccaaggttcccatcattatgattggacccggcactggtctggcaccttttcgaggcttcctgcaggaaagacttgccctggttgagtccggtgtcgagctcggaccctcggtgctgtttttcggttgtcggaatcgaagaatggactttatctacgaggaagaattgcagcgttttgtcgagtccggagctctggccgagctatccgtcgcgttctcccgagagggccccaccaaggaatacgtccagcacaagatgatggacaaggcgtccgatatttggaacatgatttcgcagggagcttacctatacgtttgtggggacgccaagggaatggcgcgagacgtccaccggtccctgcacaccattgctcaggaacagggatctatggactctactaaagccgaaggcttcgtgaagaatctgcaaacgtctggtcgatatctgagagacgtctgg

SEQ ID NO: 1083 - DNA, 2064 bp, Arabidopsis thaliana
atgacgtctgccctttatgcctccgacctgtttaagcagttgaagtcgatcatgggaacggactctctatctgacgacgtcgtgctggtcattgccaccacctctctcgccctggtggccggctttgtggttctcttatggaagaagaccacagcagaccgatctggagaactcaagcctctgatgatccctaagagcctgatggcaaaggatgaggacgatgacctggatcttggatctggaaagacgcgggtttctatcttttttggtacccaaaccggcaccgcggaagggttcgctaaggctctctctgaagagataaaggctagatacgagaaggccgccgtcaaggatgactacgccgctgacgacgaccagtacgaggaaaagctgaagaaggagacactggctttcttttgtgtcgccacctacggtgatggcgagcctactgataacgccgctcgattttacaaatggttcacagaggaaaacgaaagagacattaagctgcagcaactcgcttacggagtctttgctctgggcaatcgacagtacgagcacttcaataagattggaattgtccttgacgaagagctgtgcaagaagggagctaagcggctgattgaggtgggtctcggtgacgatgatcaatctatagaagacgattttaatgcctggaaggagtctctctggtcggaacttgacaaactgctcaaggacgaggacgataagagtgtcgccactccctacaccgctgtgattcccgaataccgtgtggtgacccacgacccccggtttaccacccagaagtccatggagtcgaacgttgctaacggtaacaccaccatcgatatccatcacccctgtcgagttgacgtggccgttcagaaggagctccacacccacgagagcgacagatcttgcatccatctcgaattcgatatttcacgaacggggatcacctatgagaccggagaccacgtaggcgtctatgctgaaaaccatgtggagattgtcgaagaggccggcaagctgctgggacactcactggacctggtgttctctatccacgctgacaaggaggacggctcacctctggagtccgcagtgcccccccccttccccggcccctgtacattgggtactggtttggctcgatacgcggaccttcttaaccccccacgaaagtccgcacttgtcgccctggccgcatacgctactgaacccagcgaggccgaaaagctgaagcacctaacttctccagacgggaaggatgagtactcacagtggatcgtggcctcccagcgctcactgctcgaagtgatggccgcatttccctctgccaagcctccactgggcgtgtttttcgctgccattgcccctaggctccagccccgttactacagtattagctcaagcccccgactggcgccctcgagggtacacgtgacttctgctctggtctacggtcctactcctaccggacgaattcacaagggtgtgtgtagtacatggatgaagaacgccgtcccagctgagaagtcccatgagtgttcgggcgctcccatttttattcgcgcctcaaacttcaagctgccttcaaacccgtcgaccccaattgtgatggtgggacctgggactggattggccccttttcgaggcttcctccaggagcgtatggcactgaaggaggacggggaggaactcggctcgtctttgcttttttttggttgtagaaacagacaaatggatttcatttacgaggacgagctgaacaactttgtcgatcagggtgtcatctcggaactgatcatggcgttctcgcgtgagggtgcgcagaaggaatacgtgcagcacaagatgatggagaaggcggcgcaggtttgggatctgatcaaggaggagggatacctctacgtatgtggcgacgctaaaggaatggcacgagatgtccatagaacactgcacacaatcgttcaggagcaggagggtgtctcctcgagcgaggctgaggcgatcgttaagaagctgcagaccgaaggcagatacctccgggatgtctgg

SEQ ID NO: 1084 - DNA, 2136 bp, Nepeta mussinii
atggattcaacgactgaaaaactttcaccgtttgatttgatggcggcaatcttaaagggcgttaagctggataattctaacggaagtgcagagacctcccagccggctgttgtcgcaatgctgatggagaacaaggatctgatgatgatgttaaccacggccgttgctgtcctgcttggttgcgtggtttacttggtgtggagaaagggggcaggcagcgccaagaaagtggttgagccaccaaaactagttctgccaaaggcgctgagtgagactgaggaagtcgacgacgggaagaagaaagtaacgatttttttcggcacacagaccggtacagctgaggggttcgccaaggctctggctgaagaagcaaaagctagataccctcaggccaatttcaaggttgtagatatggatgattatgcagctgaagatgaagaatatgaagagaaactgacgaaggagacgatggccttttttttcctggcgacatatggtgacggagagcctacagataacgccgcccgtttttataagtggtttgcggagggcaaagagagaggtgattcttttaagaatttgcactacggcgtgtttggtctaggcaaccgtcaatatgaacattttaacaagattgccattgtggtagataatattctagcggagcaaggagggaagagactggtgccggttggattgggcgatgatgatcagtgtattgaagatgattttgctgcatggagagaaaatgtctggcccgagttagacaatttgcttaggaacgaagatgatgcctccactgttagtaccccttataccgcggctgtgctagaatatagggtggaattccacgatcagtccgatgaactaagcttagaaaactcattggcgaacggacacgcaaacggaaacgcgtcatacgacgcccaacatccttgcagagccaacgtagctgtaaaaagagagcttcataccccgctgagcgaccgtagctgcacccacttagaattcgatatttctgggaccggcttgcaatacgagactggtgaccacgtaggagtctactgcgagaatctgatcgaaactgtcgaggaagccgagcgtctgcttgggttatctcctcaaacatacttctctgttcatacggacaaagaagatggaacacctctaggtgggtccgcacttccgcctccattccctccatgcacactacgtacagccctgtcaagatacgcagacctgctaaacgctccaaaaaaatccgctcttactgccctggcggcgtacgcaagcgacccaaccgaggccgataggttaaaacacttagcttctccggcgggtaaggaggaatacgctcagtatgtggtggcttctcagcgtacactgttagaggtcatggctgatttcccgtctgcgaagcctcccttgggtgtctttttcgcgggagtggcaccgaggttacagccccgtttctattccattagtagttctcctaagatcgccccgttcagaatccacgttacatgcgcgctggtatacgataaaactccgacggggaggatccacaagggtatttgctccacctggatcaaaaacgccgtaccgttggaggagtcctcagattgcagtagtgctccaatctttgttaggaactctaattttaaattaccatccgacgctaatatacccattatcatgatcggtcctggtacagggttagccccattccgtgggttcttgcaagaaaggttagcgctgaaagaatcaggggcggaactgggaccagcgatactttttttcggttgccgtaatagaaagatggactttatatatgaagacgagttgaacgattttgttaaggcgggcgtggtatctgaactgattgtcgcatttagccgtgagggttccacaaaagaatatgttcaacataagatggcacagagagcttcagacgtttggaaaatgataagcgatggtgggtacatctacgtatgcggcgacgccaagggcatggcgagagacgtacacagaacgttacacaccatcgcgcaagagcaaggttccatgagtagttctgaagctgaaggaatggtaaagaaccttcagatgaccgggcgttacctgagggacgtttgg

SEQ ID NO: 1085 - DNA, 2076 bp, Camptotheca acuminata
atgtcttcagattcagaattgataagatggttcgagtctatatttggagtaagcctgggtagcaatagcgtgtcagattctgttgcgatgttcgtaaccacctctgtcgcagtaataatagggctgctattttttttgtggagaaggtcttccgatagatccaaagaatctaatccggttgttgtgcccaggcccctgctggtagaagcggaggaggatgaagttgaagtaggctccggaaaaacgaagcttacgatattttatggtacgcaaacgggcacagcagaaggtttcgccaaggctttagcggaagaaataaaggccaggtatgagaaagcggtagtgaaagttgttgacctggatgactatgccgacgacgatgagcaatatgaggagaaactgaaaaaagaaacactagcattcttcatggtggctacgtatggggacggtgaaccaactgacaatgcagcgagattctataaatggttcacagacggcaaagagaggggcttatggctacaacaacttaaattcggagtgttcggattggggaaccgtcagtacgagcactttaacaagattggaaaggttttagatcaggacttgtccgagcagggaggcaagaggttaattccagtggggctaggcgacgacgatcagtgcatagaggatgattttgctgcatggagagagctgttatggcctgagctggatcaacttttgagagatggcgacgatacgaacaccgtatctacaccgtacacggcggttattcccgaatatagagtagttatatatgacccaaccacgacgagtttcgaggacaaacacttaagtatggccaacggcaatgcttcatacgacatccatcatccgtgccgtgtcaacgtagcggttcaaagagagttgcacaagcctgagtctgacaggtcatgcatacatctggagttcgatatttcatcaactggtattacatatgagacgggagaccacgtaggtgtttatgcggacaactgcgacgagacggtggaagaagccgcaaggctgctgggtcaaccgctggatttgctattctcaatccatagcgacgatgacaacgggactccactgggtgggtccttgccccctccattcccggggccctgcactttaaggacagcgttagctcgttatgccgacctgctaaacccaccccgtaaagccgcattaatcgcgttagcggcccatgcgatcgagccgtcagaaagcgagaaactaaaattcctatcttcaccccaaggaaaggacgactattcccagtgggttgttggatctcaaagatcattgttggaagtgatggccgaattccccagcgcgaaaccccccttaggagtgttttttgctgcagttgcaaccaggcttcaaccaagatactacagcattagctcctcacccagattcgcgccaagcagagtgcatgtcacatgcagcctggtctacgggcctacgtctacggggaggattcataaaggcgtttgtagcacgtggatgaagaacgccgtacccttggagaaatcaagaaactgtagttgggctcctatcttcatccgtgcatccaacttcaagcttccgtctaacccctcaatacccatagttatggtaggtcctggaactggtctagcacccttcagggggttccttcaggaacgtcttgccttaaaggaagacggcattcagttgggcccggcactactgtttttcggctgcaggaaccgtaggatggatttcatctatgaggacgaattgaataactttgtggaccgtggcgtcctttctgacttgatcgtagcattttcccgtgagggtccgcagaaagagtatgttcaacataagatgatggaaaaggccgcctacatatggaatttgatttcacaggagggttatttatacgtatgcggggatgccaaaggtatggcaagagacgtacataggacattacataccattgttcaggagcaggaaaacgccgacaccagcaaggcggaaagcgtcgtaaaaaagttgcaaatggatggtagatatctaagggacgtatgg

SEQ ID NO: 1086 - DNA, 2136 bp, Nepeta mussinii
atggactcgacaacagaaaaactgagcccattcgacctaatggccgccatactaaaaggcgttaagttagataattctaatggttcggcagaaacgtcgcagccagctgttgtggctatgttgatggaaaataaagacctaatgatgatgttgacaacagcagtggctgtgttattaggctgcgttgtttatctggtgtggcgaaagggtgccggttctgcaaagaaagttgtcgaacctccaaaactagttttaccaaaagctctctcagaaaccgaggaggtggacgacggaaaaaagaaggtcactattttttttggtacccaaactggtactgcagaaggttttgcgaaagctcttgcagaagaagccaaagcgagatatccacaagctaatttcaaagtcgtggatatggatgactatgcagcggaggacgaagagtacgaagagaaattgaccaaagagactatggctttttttttccttgcaacctacggtgatggtgagccaactgacaatgctgcacgcttttacaagtggttcgccgaaggtaaggaacgaggtgattcatttaaaaatttacattatggtgtgtttggtttgggaaatagacaatatgagcatttcaacaaaattgctatcgtagttgacaacattttggccgagcaaggcgggaaaagattggttcctgtaggtttaggggatgatgaccagtgtatcgaagacgatttcgcagcatggagagaaaatgtttggccggagcttgacaatttgttacgaaatgaggacgatgcaagtacagtatcgactccctatactgcagcggtgttggagtacagggtggagttccacgaccaaagtgacgagttatctttggagaactctctcgccaacggtcatgctaacggtaatgcctcatatgacgctcagcacccttgtagagcaaatgttgccgttaaaagagaattgcatacaccattatccgatagatcatgtacccaccttgaatttgacatatcaggcacaggcttacaatatgaaaccggtgatcatgtaggcgtttattgtgagaatctaattgagactgtcgaagaagctgaaagactgttgggtttgagcccacagacttattttagtgttcacaccgacaaagaagatggaactccccttggtggtagcgcacttcctccacctttcccaccctgtactttaaggacggccttatctcgatatgcggatttgttgaatgcccctaaaaagagtgcactgacagctcttgctgcttacgcgagtgaccctacggaagctgacagattaaaacacctagcttcacctgccggaaaggaagaatatgcccaatatgttgtggcttcccaaaggaccctactagaagtaatggccgatttcccatcggcaaagccacctctaggtgtgtttttcgcgggtgtcgccccaagattgcagcctagattttattccatttcttcttccccaaagattgctcccttcaggattcatgtaacctgcgctttggtgtatgacaaaactccaactggaagaatccataaaggtatctgttctacgtggataaagaatgctgtacctttggaggagagctcggattgttcgtcagctcctatctttgttcggaatagcaattttaaattaccatctgacgcaaacataccaattatcatgatcggtccaggcactgggctagcaccattcaggggttttttacaagaacgcctggctttaaaagagtccggtgcagaactgggcccagccattttgttctttggatgtcgtaacaggaaaatggacttcatatatgaagatgaactgaacgattttgtaaaggctggtgttgtgagtgagttgattgttgcctttagcagagaaggatcaactaaagaatacgttcaacacaagatggcacaacgtgcatctgacgtatggaaaatgatcagcgatggaggttacatttacgtctgcggcgacgcaaagggtatggctagagatgtacataggactttgcacaccatcgcccaagaacaaggctcaatgtcctcatccgaagccgagggtatggtaaaaaatttacaaatgacaggaaggtatctccgtgacgtctgg

SEQ ID NO: 1087 - DNA, 2076 bp, Camptotheca acuminata
atgtcatcagactcagaattaatccgatggttcgaatctatttttggagtctcattaggatccaactcagtcagcgacagtgtcgctatgttcgttactaccagcgtcgcagttattataggattattgttctttctttggagacgctcgtcagatagatctaaagaaagcaacccagttgttgtacctagacctttactggtagaagctgaagaagatgaggtggaagtcggttctggaaaaacaaaattgacaattttctacggtacacagaccggtactgcggaaggtttcgctaaggctctagcagaagagatcaaggctcgttacgaaaaagccgttgtaaaagtcgtcgacctagatgactatgccgacgatgacgaacaatatgaggaaaagttgaaaaaggaaacgctggctttctttatggttgctacttatggggacggtgaaccgacagacaatgccgctagattctataagtggtttaccgacggcaaagaaagaggtttgtggttacagcaattgaaatttggtgtgtttggtctaggtaatagacagtatgagcattttaataagatagggaaggttttagaccaggatttaagtgaacaagggggtaaacgattgattccagtaggactaggagatgatgaccagtgcattgaagacgattttgccgcctggcgggaacttttgtggcctgaattagatcagttgcttagggatggtgacgacactaacaccgtgagtaccccctatactgccgtcatccctgagtacagagtcgtcatatacgatccgacaactacctcattcgaagacaagcatctatcaatggcaaatgggaatgcctcttacgacatccaccacccatgtcgcgttaatgtagctgttcaaagagaactgcataagccagagtctgatcgatcatgtatccatttggaattcgatatatcctctacagggatcacatatgagaccggtgatcatgtaggcgtgtacgccgacaactgtgatgaaactgtagaagaagctgcccgattgttgggccagcctttggatctacttttttccattcattccgacgacgataacggtactcccctaggtggtagtctgccgccaccttttccaggcccttgtaccttaaggacagctttggctagatatgccgacttattgaatccaccacgaaaagctgcccttattgcccttgcagcccatgccattgaaccatcagaatcggaaaaattaaaattcttgagttcgccacaaggaaaagacgattactctcaatgggtcgttgggtctcaacgtagtctattggaagttatggctgaatttcccagcgcaaagccaccattgggtgttttcttcgccgcagttgctactagattacagccaagatattattcaattagcagttctcctagatttgcaccttctagagttcatgttacttgctctttagtttacggtcccacatcaaccggacgtattcacaaaggagtttgttcaacctggatgaagaatgctgtaccattagaaaagtcacgcaactgttcatgggccccaatttttattcgtgcttcaaacttcaaattacctagcaacccaagtattcctatagtgatggttggtccaggcactggcttagcacctttcagaggcttcttacaagagagattggccctgaaggaagacggtattcaattgggtccagccttgcttttttttggttgcagaaatagaaggatggattttatatatgaggacgagttaaataacttcgtggaccgcggtgttcttagtgacttaattgtcgcctttagtagagagggtccgcagaaagaatatgttcaacacaagatgatggaaaaagcggcttacatttggaatctaatttctcaggaaggctatctatatgtatgcggcgatgccaagggaatggctcgagatgttcatagaactcttcataccattgtccaagaacaagaaaatgctgatacttcaaaggccgaatcggttgtgaaaaaacttcaaatggacgggcgctatttgagagatgtgtgg

SEQ ID NO: 1088 - DNA, 1485 bp, Swertia mussotii
atggatttcgatttcctaaccatcgcaattggttttctctttacgattaccctctaccaagccctcaacttcttctctaggaagtctaagaacctgccccctggtcctagtcccctgcccctgattggaaatcttcaccttctcggtgaccagccccataaatccctggctaagttggccaagaagcacggcccaatcatgggacttcagcttgggcaggtgactaccatcgtcgttacatctagcggcatggcgaaggaagtccttcagaagcaggacttggctttctcgtcgcgaagcattcccaacgccatccatgcccatgaccagtacaagtactctgttatctggctcccagttgcctcacgttggcggggtctccgaaaggccctcaattccaacatgttctccggtaacaggctggacgccaaccagcacctgagatctcggaaagtgcaggaactcattgcttactgccgcaagagctctcagaccggggacgcaattgacgtgggacgagccgcttttcgaacttctctcaaccttctttctaacaccatgttctccaaggacctgacagacccctactcggattcggcaaaggagttcaaggatctggtctggaacgtgatggtggaggcagggaaacccaacctggtggattacttcccccttctcgacaaggtggacccacaggggatcaggaagcgaatgactattcatttcggtaaaatcttggaactttttgggggtcttattgacgagcgacttcagcagaaaaaagccaagggtgtgaacgatgatgttctcgacgtccttctcaccacgtccgaggaatcgcccgaagaaattgatcgtacccatatccaacgaatgtgtcttgaccttttcgtggccggtactgacaccacctccagtaccctggagtgggccatgagcgagatgctgaagaaccccgaaaagatgaaggctgcgcaggccgagctggcgcaggtgatcggcaagggtaaagccgtggaggaagccgaccttgcgaggcttccctacctccggtgcgctatcaaggaaaccctcaggattcatccacctgttcctcttctcattccgcgcaggactgagcaggaggtggaggtctgtggctatacggttcctaagaactcccaggtcctcgtcaacgtctgggcgatcagtcgcgacgacgccatctggaaagaccctctgtccttcaagccggagagatttcttgagtctgagctggagatgcgaggtaaggacttcgagctgattccatttggcgccggccgacgcatctgtcccggcttgcccctcgcggtgcgaatggtgcctgttatgctcggctctctgctcaatagcttcgattggaagctggaaggaggcattgcccccaaagacctggacatggaggagaagtttgggattaccttgcagaaggctcaccctcttcgagctgtagctacccccctc

SEQ ID NO: 1089 - DNA, 1494 bp, Camptotheca acuminata
atggactttttttcctttcttttgtacttcctctttacactttccctggttcaggcgacgatttctctcgtccgaggatccaagcataagggacgaaagttgccccctggtcccgctccgcttcccattgtgggaaacctgttgaagctgggtgaccagccccacaaatctctcgcagatcttgccaagatccacgggccgatcatgactctgaagctgggacacatcactaccgtgatcattagctcctctgacctcgctaaggaggtgctgcagaagcaggacttggccttcagctctagatcgatcccagacgcaatccgggcccacaaccagttccagtactcggttgtttggctgcctgtcgcaaaccagtggagatcccttcggaagattctcaacagcaacattttctcgggcaatcgtctcgacgcgaaccagcatctccggtggcggaaggtgcaggagcttattgcttacgtgcgaaagtccagtcaggttggggacgcagtagatatcgggcgagcagccttcagaacgtccctgaacctcctctctaataccattttttctgttgacctagccgaccctaacaacgactccgcgaaggagttcaaggatctcgtttctaacatcatggtggaggccggaaagcctaatttggttgattacttccccgttctggaaaagatcgacccccagggtatccgccgaagaatgaccattcacttcggaaaggttctggagatgttcggacgactgattaacgagcgactggagtttcgacgactgcgctcatctgtcattagcaacgacgttctcgacgtgcttctcaacacagaggagtccggaaacgagatcgaccgaaaccacatcgagagaatgtgcctcgaccttttcgtagcaggtaccgataccacctccagcactcttgagtgggccatggccgaggtgctccataacccagagactctggtcaaagctaaggctgagctcgaacagattattggtcgaggaaaggccattgaggagtcggacatctccaacttgccctacctgcgatctatcatcaaagagacccttcgtttgcatccccctgtgcccttcctaatcccgcggaaagtggaggtggacagcgaagtgtccggttacacggttcctaagggttcgcaggtcctggtcaacgcctgggccataggacgcgacccatgctgctgggagaaccctcttaacttctcgccagagcggttcctgaactctgagctggacgttcgtggccgagactttgagctcattccttttggtgccggacgacgtatttgccccggtctccccctggctattcgaatggtaccagtcatgctgggcagtctcctgaatagctttgactggaagctggacggcggtatcaagcctgaggagctcgacatggaggaaaagttcggaatcacactgcagaaggcacaacccctgagggccgtcccgactctggtg

SEQ ID NO: 1090 - DNA, 1494 bp, Lonicera japonica
atggatttttttacaatcgccctctccctcctcttcgctttcacgctattcaaggccattattagcctcaccaagtctggtaaaaacaagaacctccctcctggaccagcgccgcttcccattatcggttccttgcacaaactgggagaccagcctcaccagtcgcttgctaaacttgcaaaaatttacggtcccatcatgtccctgaaactgggtcggatcaccacagtggtgatctcatcctctgacgctgccaaggaggtgctacagaagaaggacctggccttttcatcaagacacgtacccgacgccctccatgctcataatcagttcaagttctcagtggtctggttgcctgtggcaccccagtggcgaagcttgagaaagatcctcaattccaatattttctccggcaatcgacttgatgcgaatcagcacctccggtgccgaaaggtcgaagagcttattacctactgtaggaaatcatctcactcgggcgacgctgtggacatcggtagagccgctttccgcacatctctgaatctcctctctaataccatcttctcgaaggacctgaccgacccctaccaggatagcgcgaaggagtttaaggagctcgttggtaacattatggtcgaggctggcaagcccaatctcgtcgacttctttccttccctgaaaaagattgatcctcaaggcattagacacagaatgaccattcattttggcaaagtgcttgagctctttggtggattgatcaacgaacgacttgagctcaagtccagtcagaagtctgatgaaaaaaatgacgtcctcgatgtgtgtctgagcatttctaaggaaaatcccgatgagatcgatcgaacgcacatcgaacggatgtgtctggatctttttgtcgcgggcacagatactacttcgtctaccctggagtgggcgatggccgaagtcttgcggaacccggagaccctggtgaaggccaaggccgagcttgaggaggtgatcggtaaaggcaagatcctcgcagaagccgacgtgtcgaacctgccctatctgcgttgcatcgtgaaagaaaccctgagaatccacccaccagtcccgttcctgattccccgcaaagtcgagatggatgttgaggcttgcgggtacaccgtgcccaagaactcgcaggtgttcgtgaacgtctgggccattggccgcgacccaaccctgtgggaggaccccttgtctttcaagcctgagcgattcatggcctcagagctggatgttcgaggccgagacttcgagctcttgccttttggcgcgggccgacgaatctgtcccggcttgccactggccatcaggatggttcccgtgatgctgggtagcctcgttaactcttttaactggaagctcgacggaggaatcgcccctaaggagttggatatgggcgagaagttcggtattactctagctaaggcccagtccctcagagcagtcccttctcccctagtg

SEQ ID NO: 1091 - DNA, 1473 bp, Erythranthe guttata
atggatttcattaccctcgcactggtgctaatctttgtgttgatcattattcatgcgatccagactatttccacccgaggcaaaaagctgccgcccggaccaacccttcttcccttgattgggaacctccacttgcttggtgaccagccgcataagtctctttgtcggctggccgagactcatggaccactgatgcgagttagactgggcttcatcaacaccgtcgtcatctcctcggctgagatggcgaaggaagttctccagaagcatgatctggcgttctcatcccgttcggtcccaaatgctctcctcgcccacgaccaattcaagtatagcgctgtttggcttcctgtgggtcccagatggcgatcgctgaggaaggcgctgaactcgaacatgctttctgttggtcggcttgactttggccagaatctcagatgtcgaaaggtcgatgagctcgtagagtactgccgacgctcttctatcagcggagaagctgtggatgtgggtcgggccgcctttagaacatctctcaacctgctgtccaacactattttctccaaggatctgacagatcccttctctgacagtgcgaaggagctgaaggatctcgtgtggaatatcatgctcgaggctggaaagcccaacctcgtggacttcttccctattttgggtaaactggacccgcagggcatacggcggcgaatgacagtcaattttggaaaggtaatcgatttgctctcgggtctgattgacgaacgaatcgaacgaggcaaatccgaccagaacgccgatgtgatcgatgttttactcgctgcctgtaaggagaatcctgaggatatagatagaactcacatcgagcgtatttgtctagacttgtttgctgccggaactgacacttcttcttctacagttgagtgggctatggccgaggcgctcgccaattctgaaattatgaaaaaggccaaggcggagttggaggaggtcgtgggaaagggtaaggtcattgaggaagccgacatttctcgactgccctacctgcagtgcatggtcaaggagaccctccggctccaccctcccgtgcctcttctgatcccccgtcgagtcgaggacgacgtcgacgtgtgcggatacaccgtaccaaagaattcgcaagtgctcgtcaacgcctgggccatcggccgcgacgcaggtatttgggagaaccctcttgagttcaaacctgagcgattcgtaggcagtgaggtcgacgtgaagggtcgagatttcgaactcatcccctttggaggcggccgacgaatctgcccgggactgcctctcgccgtgaagatggtacctgtcatggtgggttctcttctcaactctttcgattggaaaatcgagtactccggaattggggagttcgacatggaagaaaagtttggaattaccttacagaaggctcgacccctgttggcagtccctatccccctt

SEQ ID NO: 1092 - DNA, 1458 bp, Erythranthe guttata
atggatttcatcacactcttttctctgggtttggtgtttattctgattttgatgactgctgtgcaaacgatctctactcgtgggaagaagctgcctcccggcccgacccccttgcccctgattggaaaccttcacctcctcggagatcagccgcataagtcgctgtgcagactggccaaaactcacggtcccctgatgtacctgcgactcggcttcattaacacagtggtcatttcgtcagccgagatggctaaggaggtgcttcagaagcacgaccttgccttttctagtcgcagtattcccaatgccatccacgctcacgatcagtttaagtacagcgtggtttggctccctgtcggacccagatggagatcgctacgcaaggccctgaccgccaatatgttttcttccagccgactggattctggacaaaagttgcgatgtcgcaaggtgcaggagcttgtggactactgccgttcaggagaggtggtggacgttggtcgagcggcttttcgaacctctctcaatctcctgtcctccacgattttttgcaaggatctcaccgaccccttctcggactcggcaaaggagttccgcgacttggtctggaacatcatggtggaagccggaaagcctaatctggttgacttctttccaatcctgggaaagctggaccctcagggcgttcgacgccgcactactgtacacttcggcgagctgctttacctttttggtggtctgatcgacgagcgacttgagaaagggaagtccgaccagaacgctgacgtcatggacgttctgcttgccgcctggaaggaaaacccagaagagatcgaccgaacccacatcgagcgaatgtgcctggacctgtttatagccggaactgacacatcttcttctacagtcgagtgggcgatggcagaggcgctggcgaaccctgagattatgaaaaaggccaaagccgagttggaagagattgttggtaaaggcaaagtgctggaggaggccgatatctccaggctcccctacctaagatgtatggttaaagaaactctgagacttcacccccccgtgcccttccttatcccccgtcgagtcgaggacgacgttgacgtctgtggatacaccgtgcctaagaattcccaggtgcttgtgaacgcctgggccattggaagagacgctggaatttgggagaaccccctggagttcaaacccgagcgatttgtggggtccgaagtcgatgtcaagggaagagactttgagcttattcccttcggtggcggtcggagaatctgtcccggcctacctctggctgtccggatggtgccgatgatggttggaagtctgctcaattcgttcgattggaaggtcgaggaagaaatcatcgacatggaggaaaagttcggtatcacactccagaaggcgcggccactgctcgccattcccattcccttgttc

SEQ ID NO: 1093 - DNA, 1476 bp, Nepeta cataria
atggacttcctcaccatctttatcggccctctgctggctattatcgccctgttctatgcccgactgactatttcgacccgcggtaagaaccttccccctggtccgacccccctgcctttcattggaaacctccatctcttagggcatcatccccacaagtcgctggcccgcctggccaagacctacggtcccctgatgctgctacgtttgggctctgagaacaccgttgtggtatctagtgccgccgtcgctaaggaagtgctgcagaagcatgatcttgccttctcttcccggtcgatccccgatgccgtgcacgctcacgatcagttcaaatactcggtagtgtggctgcccgtggccagccgttggcgctcactgcgaaaaaccatgaactctaatattttctcaggctcctgcttggacgctaaccagcaccttcgttctcggaaggtggaggagctgatcgcctactgtaaggagagctgcagacgtgctgaggccgtcgacgtcggccgagccgcgtttcgtactgcccttaactctttgtcgaatacaatcttctctcgagacctggccgacccactaagcgattctggtaaggagttcaaggatgtcgtgtcttcgattatgatggaggccggtaagcctaactctgtcgattattacccattcctttccagattcgaccctcagggtatccgacgacgcactgccatctacttcgacaagcttatcaacatttttaagggactcattgatgaacgactcgagaaaagacgctcccagtacgaggaggccactgacgtgatcgatatccttctgaacacaattgagcaaaaccctgaggagattgaccgcacacatattgagcgaatgtttctggacttgtttctggcgggcaccgatactacgagcagcacagttgaatgggccatggctgaggccatgaagaaccctgagactatgaagaaggctaaagccgagctggcccaggtcatcgggaagggcaagattgtgcaagagactgacattccccatttgccttaccttcaatgcatcgtaaaggaaacactgagactgcatccccctgtgcccttcctcatcccccgtcgggtccatgaagacgtggatatcctgggatacgttgtgcccaacaacagtcaggtgttcgttaatatgtgggctataggccgagaccctgacatgtggaagaaccctctgcagttcgaccccgaccggtttcatgattctgaggtgggtctacggggtaaggactttgagctcatccccttcggtgccggtcgtcgtatttgccccgggctccctctcgctatgcggatggtccccgttgtacttggatcgttgctaaacagcttcgactggaaggtggaaggcggaaaagagctggagatgaatgagaagtttggtatcacactggagaaggctcagcccctgatggctgtgccaattgctctt

SEQ ID NO: 1094 - DNA, 1482 bp, Picrorhiza kurrooa
atggatttcttgacgattattcttggactgttgttcgccatcaccctaatccacggctaccaactcctctcctctaagggcaagcgactccctcccggacccacccccctgcccctgatcggctctcttcatctgctaggagatcagcctcatcagtccctcgccaagcttgcaaaaaagcatggcgaactgatgtgtctccggttgggctttatcaacaccatcgttatctcctctgctgccatggccaaagaggttctgcaaaagcaggaccttgctttctctagccgaatgtcgcctaacgcagtgcatgctcacgatcaatttaagtactcggtggtgtggctgccggtcgcggcgcgctggcgttctctccgtaaagtgctgaactctaagatcttcagtgggaaccgaatggacgccaaccagcacctccgtggccgaaagcgacaggagcttattgcatactgtaggaagcgtagtcagaccggaggcgccggagacatgggacgagcccccttccgtaaccctgtcaatctcgcggtcgagcatgacttcttcaaacggattgaagacccatactctgattctgcaaaagagttcaaggatctggtgtggaacatcatgctggaagcaggtaaaccgaacctggtggacttctatcctgttctggagaaagttgacccgcaaggaatcaggaagcgaatgactgttcattttggaaaggtgatcgagctgttctctggactaatcaacgagcggaccgagaagggaaagacacaggacgccgggacgacagacgttatcgacgttctactcaagatctcgaaggaaaatcccgacgagattgaccgaacacacattgagaggctttgcctggacctcttcgtcgctggaactgacacgacatctaacactttagagtgggctatggctgagtctctcaagaaccctgagattatgaagaaggctaaggccgagctggagcaggtgattggaaagggaaaggtgctggatgaagccgatattcagcgactgccctacttgcgatgcatggttaaggaaaccctgcgtattcatccacctgtgcccttcctcattccgcgtaaggttgagcaggacgttgaagtctgcggctacactgtgcccaagaacagccaggtcttcgttaacgcatgggccattggccgtgacgccgaaacatggccgaaccctcttgagtttaaaccggagcgattcatggagtccgaggtcgacatgcgaggacgtgatttcgagctaatcccattcggagccggccgacgcatttgcccaggactgccactggctctgcgtatggttcccgtgatgctgggcagcctgctaaactcttttgactggaaactcgagggcggtgccggaccgaaggagctggatatggaggaaaagtttggtatcactctccagaaggctttgcctctcatggccgtcccggtcccgctc

SEQ ID NO: 1095 - DNA, 1467 bp, Picrorhiza kurrooa
atggacttcctaaccatcattctcggactgctcttcgcggttacgcttatccacggctaccagctgctttcctccaagggtaagcgactgccgcccggcccaactccacttcctcttattggttcacttcatctgttgggcgaccaaccacatcagtcgctcgcgaaattggctaaaaagcatggtgagctcatgtgtcttcgcctcggctttatcaataccatcgtgatcagctctgccgccatggctaaggaggttctacaaaaacaggaccttgcattctcgtcgcgaatgagtccaaacgctgtccacgcccacgatcaattcaagtactccgttgtgtggctgccagtcgcggctcgctggcgaagcctgagaaaggtcctgaactccaatatcttctcaggtaacagacttgatgccaaccagcacctccggtgtcgaaaagtccaggaactgatcgcttactgcagaaagtcctcccagaccggggctgctgttgacatgggcagggccgctttccgtacctccctcaatctcctgtccaacacgattttcagtaaggaccttactgatccgttctctgatagcgccaaggagttcaaggagctggtgtggaacattatgctcgaggctggaaagccgaaccttgtggacttttacccagccctggagaagttggaccctcagggcatcagaaagcgaatgaccgtgcacttcggtaaagtcattgagctcttctcaggtctgatcaatgagcgtactgaaacaggtaagacacaaatgctcgggacaacggacgtcatcgatgtgttgtctgattctaaggagactcgtaggatcgaccgcactcacattgaacgactttgccttgatctattcgtcggcggactgacacacatcaacaccttggtgtgggccatggccgaccacgtccgcacacggaagtattgcaagtcccgactgacccgcaccgtgatcggcaagggcaagttcagcaccaagcagaatattcagagactgccttacctgcgttgcatggttaaggaaaccctcagaatacaccccccagttcccttcctcatccctcgaaaggtggaacaagacgtggacgtctgcggttacactgttcctaaaaactcccaggtctttgtcaacgcatgggctatcggacgagatccggagacgtggcctaatcccctggagtttaagcctgagcgttttatggaatctgaagtggacatgcgaggccgcgacttcgagctcatacccttcggggccggtcgccggatctgtcccggagttacactcgctgttaggatggtcccggttatgctcggctccctcctgaactctttcgactggaagctggagggtggagctggacctaaggacttggacatggaagagaagttcggtatcacacttcagaaagccctgcctctcatggccgttcccattccattg

SEQ ID NO: 1096 - DNA, 1470 bp, Nepeta mussinii
atggacttccttactattaccgtgggtctggtgtctgcaattatcatcactttcatttacggattttccctgagtcgtcgaggcaagaacctgccccccggccccacacccttgcccctgatcggcagtctccacctgctcgggggacagccccacaagagccttgccagactggcaaatatctacggccctctgatgaggctccgcctgggtagtgtcaataccattgtggtgtcttccgccgccgtggcgcgagaagtcctccagaagcacgacctggctttctcatcccgaagcatccccgatgccctacatgcacacgatcacttcaagtactccgtcgtgtggctgcccgtggcctcgcgatggcgatcactacgcaagactatgaactcaaacatcttttccggcagccgacttgacgcgaatcagcacttgcgatctcgaaaggtggaagagctggtggactactgcagagagtgttctcgtaccgctgaggcagtgcatgtcggaagggctgcgtttcggacggtcctgaactcactctcgaacactattttctccaaggacctggccgaccctttcagtgactcaggcaaggagtttaaggaaattgtgagtaacattatgaaggaggctggcatgcctaacctcgtggattttttccccttcctggcccggtttgaccctcagggaatccgaagaagaactaccgtttactttggaaagattattcatctcttttcgggtctcatccaggagaagctcgaaaacaccaatcaggaagagaatatcgacgttatccagattcttctcaataccagtcgacagtccccccaggagatcgatcgaacacacatcgaaaggatgtgtctcgacctgttcgtcgccggaacggacacgtcttcctctacagttgagtgggccatggctgaagctcttaagaacctggagacgatgaagactgccaaggttgaactggagcaggtgatcggaaaagggaagacaattcaggagacagacgtaagccgactgccctacctgcaatgtatggttaaggaaacactacgcctgcatccacccgtgcccttcctgattcccagaaccgtggaccaagacgtggaggtccttggtcatgtcgtgccaaagaatagccgtgtgtttgtgaacatgtgggcaatcggacgagaccctgacgtctgggaaaaccccctggaattcaatccccgtcgattcctggactctgaggtggacgtgcgaggaactaacttcgagctcattcctttcggcgccggacggagaatttgccctggcctgcccctcgctatgcgaatggtccctgtaatgttggggtctttgctcaactcgttcgactggaagctagagggcggcgagaacctggacatggacgagaagttcggtatcaccctggagaaggctcagcctctccgtgtggttcccatctctctc

SEQ ID NO: 1097 - DNA, 1482 bp, Olea europaea
atggatttcctgacaatcgtgctgggactgctgttcgcgctgaccctaatccaggcgttccgttcgatttccacacgtggaaaaaacctgcctccgggtcccaccccgctccccatcatcggcaacctgcacttgctcggtgaccagccgcataagtcgctagcaaagctggccaagacttacggccctattatgtgcctccgatttggatccatcaatactgttgttattacttctagtgctatggctaaggaagttcttcagaagcaggacctggctttttcctctagacacatccctaacgcaatccacgcgcataaccagtttaagtattcagtcgtctggctacccgtcgcctctacttggagatctctccgcaagattctgaactcgaatatgttctcgggaaaccgattggatgctaaccagcacctgagagttcgaaaggtccaggagctgattacatactgtcgtaagaatagccaggctggagaggcagtcgacattggccgggccgcctttcgtacctcccttaacctgctgagcaacaccatttttagcaaggatctgaccgatcctttctcggactcggctaaggagttcaaggatttggtgtggaacgttatggttgaggctgggaaaccgaatcttgtggactttttccctgtcctcgaaaagctcgacccccttggaatccgacgcagaatgaccattcactttggcaagattattgagctctttggaggtctgattaacgaacggcttaagagacggatgtctgacaactctaagaatagcgacgtgctcgacgtgctgctggatacttctcaggagaacccagaggaaatcgacagagtgcacatcgagcgtctgtgcttagacttgtttgtggctggaactgacacaacgtctagcactctcgagtgggccatggcggagacgctcaagaaccccgctaccatgaaaaaggccaaggcggagctggaagaggttatcggtaaaggaaaagttttggaggaggccgatgtgtctagacttccctacctccggtgcatggtgaaggaggccctgagaatccacccccccgttcccttcctgatccctaggcgcgtggagcaagacgtggaagtatctggatatacagtgccgaagaactcccaagtgcttgtgaacgcctgggcaataggtcgagaccctaccctgtgggaaaaccccctggaatttaagccagaacggttcatggaatcggagctcgacatccgtggccgcgactttgaactgatccccttcggtgccgggcgacgaatttgccccggcctgcctctcgccatccgaatggtccctgtcatgctgggctcgctggtgaacagcttcgactggaagctggagggcggaatttcgccaaaggatctggacatggaggagaagtttggtattacactccagaaagcgaacccgctgcgggccgttcctacacccttg

SEQ ID NO: 1098 - DNA, 1482 bp, Sesamum indicum
atggacttcctgactattgtgcttggcctcctgttcacacttgtgctcgttcacggactccagactctttctgctagggccaagaaactccctcctgggcccacgcctctaccacttatcggctctctgcacctcctgggcgaccagcctcaccaatctcttgctaagcttgcgaagactcacgggcccctcatgtgtctccgcttgggatttattaacacggtcgttgtatcgtcggcagcaatggcgaaggaggttctccaaaaacaggatctcgtcttcagcagtagaaccataccggatgctattcacgcacacgaccagtttaagtactctgttgtctggttgcccgtcgcttcacgatggcgtagtctgcgtaaggtgctcaactcgaacatcttctctggctcccgtctggacgccaaccagcacctacgatgccgtaaggtgcaggagctcatcgcctattgcaggaagaattcacagaccggtgagccagtggacgtgggacgagccgcgttccgaacctcccttaacctcctttctaacaccatcttttcgaaggatctgacagaccctttttctgactctgccaaggaatttaaggacctcgtgtggaacattatggtcgaggctggaaagccaaacctggtcgatttctttccaatgctcgaaaagcttgatccccagggcatacgaagacgaatgaccattcatttcggaaaggtgatcgatctgtttagtggtcttatcaacgaacggctggaaaagggtaagactcagaacgctggtaactccgatgttatcgacatcctcttggcaacttctaaggaaaacccagaggagattgaccgagttcacatcgaacgtatgtgcctggatttgtttgtagctggcaccgacaccacatcgtctacgctggagtgggcaatggccgaggccctgaagaaccccgagacggtcaagaaggctaaggcggagctcgaagaggtgatcggtaagggcaaggtcctcgacgaggctgacatttcacgtttgccctacctacgctgcatggtgaaggagacgctaagaatccacccccctgtaccattcttgattccccgaagggtggaccaggatgtggaggtttgtggttacaccgttcccaagaactctcaggtcttcgtgaatgcctgggccattggtcgggaccccgatgtctggaaggaccccctcgaattcaagcccgagcgattcttggagtccgaactcgacatgcgaggacgagacttcgagctgattccctttggtgcaggacggcggatttgtccgggtttgcccctcgccgtgcgaatggtccccgtgatgctcggttcgctgctgaatagcttcgactggaaactggaaaacggcatcggtcccaaggaactggatatggatgaaaagttcggcatcaccctccagaaggctagacccctcagagctgtgcctcttcctctc

SEQ ID NO: 1099 - DNA, 1479 bp, Coffea canephora
atggactcgctgatggttgtcctggcttctctgctgtcgctgactttgattaaaggtctctcttccctggcgcgacgggctaagaaacatccgccgggacccacgcccctgccccttattggcaacctgcatctgcttggcgacctcccccatcagagccttgccaagctggccaagatccacggaccggttaccagtctgaaactcggacaactgacaactgttgtcatttcctcttcgagtatggctcgggaggtattgcagaaaaaggacctggccttcagttcgcgatccatccccgatgcggtccatgctcagaaccatagtcactactcggtcgtttggcttcccgtcgcatcgcgctggcgatccctgcgacgcattatgaactcaaatatgttttctgcaaactcgcttgacgccaatcaacaccttcgatgtagaaaggtgcaggagcttgttgactgctgtcagaagaactgtcagaccggcgaggccgttgatattggccgagcaggcttcatgaccagcctgaacctgctgtctaacacgattttttcgaaggacctggctgatccttactccgacactgccaaggagttcaaggaccttgtgtgggacatcatggtcgaagcaggcaagcccaacccggtcgacttctttcccctactcaagaaatttgaccccagaggtgtccgtcgacggatgagtgtacatttcgaaaaggtgctaaagctcttcgagggtttgatcaacgagcgactggaatccggaaactctggcgacgagggacgcgatgtcctggacgagctgctgaccacatccgaagagagctcccaggagtttgaccggatcgatatggtccacatgtttctagacctgtttgtggctggaacggataccacgagctctacactcgaatgggctatgaccgaactgctgaagaaccctgagaagatgagaaaggcacaggccgaaatcgccggaggaatcggcaagggcaaggccatcgaggaggctgatgtggcccgcctgccctacctgcagtgcattgtgaaggagaccctcagaattcatccccctgtgcctttccttatccctcgccgagtcgagcaggatgtggagctgtgtggatacaatgtgccaaaaggatcgcaggtcctagttaacgcttgggctatttgccgagatgagatcgtctgggaaaatgccctggtttttaagccggaacgtttcctggaatccgagatcgacattagaggccgagacttcgagctgatcccgttcggcgccggtcgacggatctgtccaggactccccctggccgctagagtagtgcccgtcatgctgggctcgctccttaactcctttgattggaagctggagggaggtaacacccccaaggatctggacatggaagaaaaatacggaatcactctccagaaggctctgccacttcgtgcagtccccctacctttg

SEQ ID NO: 1100 - DNA, 1485 bp, Dorcoceras hygrometricum
atggattggatcacaattgtcgtcgtgttgctttctgccctgactctttcccacgggtatcgagtgctgtactccacctgggtgaagaaacacccccctggacctactccgctccccatcatcggaaacattcaccttctcgggaaccagcctcataaaagtctggccaagctagctaagacacacggcccgctcatgcgtctcaggctaggcttcattaacaccgttgtcatatcttcttccgctatggccaaggaagttctccagaagcaggacttggcattctcatcccgatgggcccctgacgcactccacgcctgcgatcatagtaactacagcgtcgtttggctgcctgtcgccgcccgatggcgatccctccgcaaggtgcttacttctaacatcttctccggctcccgactggatgcgaaccaacacctgtcttctagaaaggtgcaagagctgatcgcttattgcggttcttcttctcaaacaggtgaggctgtcgatgtgggtcgcgcagcctttcgaacctccctcaatctactttccaacacgattttctctgttgaccttgctgacccctttagcgattccggcaaggaattcaaggatctcgtgtgtaacattatggtggaggcaggtaaaccaaacctggtggactactttcccttcctcgagaagatcgatccccaaggcattcggcgacggatgacatttcacttcgaaaaggtcattgagttgttctcctgcctgattgctgagcgactggagaagggcgagtcgaaggattctgagaccaacgacgtcatagacgtgttgttagctacctcgaaggagaatcctgaggaaatggacagaactcatatcgagcggctctgtctggacatgtttgtcgctggaactgacaccactagtaacaccctcgaatgggccatgactgaggccatccggaaccccgagattatgaaaaaagctaagtcagagctggaggaaattgtgggaaagggcaagatcatttccgaagaggaggtccagcgacttccctatctgagatgtatggttaaggagaccttgcgtatccaccctcccgtaccttttcttatccctcgaaaggtcgaggaggacgtccaagtgtgcggttacacagtccctcggaactcacagatactggttaacgcgtgggccataggacgggacggagacgcctggaagaacccacttgaattcaaacctgagagattcctcggctcggaaatagacgtgaggggccgagactttgagctgatcccgttcggcgccggacgacgaatctgccccggtctgcccctagccattcgtatggttcctgttatcctgggttccctcctgaacagtttcgattggaagctggaaggaggttcctctcccgacgaggtcgacgtggaggagaagttcggtattactctgcagaaagctattccactcagggctgtaccaattcctctg

SEQ ID NO: 1101 - DNA, 1479 bp, Gentiana rigescens
atggactacctgaccattgcactcggttttctgttcgccctaaccctgtaccaggccttgatttctttctcccggaagtctaagaacctaccccctggtccggcaccacttccctttattggaaatcttcacctgctgggtgaccagccacacaagtctcttgcaaagctagcgaagaagcacggacccatcatgggcctccagttcggacaagtgacaaccattgtcgttacaagctccggcatggccaaggaggtccttcagaagcaggacctggctttttcgtcgcgatccgtgcccaacgcacttcacgctcacgatcaatacaaatacagcgtcatttggcttcccgtggccagccaatggaggtccctccggaaagtgctgaactctaacatcttctcgggaaatcggctggacgcaaaccagcatctaagatgccgcaaggttcaagagctcattgcttactgccgaaagaactgccagacaggcgaagccgtcgatcttggtcgggcggcctttcgaactagtctgaacctcctgtcgaataccatctttagcaaggatctcaccgatccttacagtgatagcgctaaggaatttaaagatctggtttggaatgtgatggtggaggctggcaagcccaatctcgtcgacttcttccccgttctggacaaggttgaccctcagggaattagaaagcgaatgactttccacttcggtaaaatcctccagctgttcggtggcctcatcaatgagaggttgcagcagaacaaggcgaagggcgctcacaaagacgtgctcgatgtgctgcttaagacctcgcaggagactcccgacgagctcaaccgaacccatatcgaacgaatgtgtctcgacctctttgtggctggaactgataccacttcctccaccctggagtgggctatggcggagatgctgaagagcccggacaaaatgaacaaggccaaggaggagctggcacaggtgatcgggaaaggcaaggccgttgaagaggccgatatcgcgagcctcccatacctccggtgcgccataaaggaaacgctgagaatccaccctcccgtgcctttcttaatccctcgacggactgagcaggaggtcgaggtttgtggatacactgtacctaaaaactcccaggtgtttgtcaacgtctgggctatcggccgagatgagaccacgtggcctgacgccctagagttcaagcccgagcgttttctggaaagtgaaattgacatgcggggtcgggacttcgagcttctgccctttggcgccggtcgacgaatctgccccggcttcccattggcggtgagaatggtgccggtcatgcttgggtcactgctaaattccttcgactggaagcttgagggtggaattgcccccaaggatctcgacatggaggagaaattcggtattacgctacaaaaggctcatccccttcgagctattcccacctccttg

SEQ ID NO: 1102 - DNA, 1479 bp, Vinca minor
atggactatctcacaatagcgctgggcctgttgtttgcgctgaccttctaccagggtctcacttacctctcaagaaggtcgcagaagctccccccaggcccattgcctctgcctatcattggtaatctgcatctgcttggggatcaccctcacaaatctcttgccaagctttccaagaagtacggtcccattatgtcacttaagctgggtcgaatcactactctggtgattagttcttccacgacagccaaagaagttttgcagaagcaggaccttgcattttccagtagatccgtgcccaacgctctccacgctcataaccagtttcagtattctgttgtctggcttcccgtcgcctcgagatggagatcgctgcgcaagatcctaaactcaaatattttctcaggaaacagactcgacgctaaccagcacctgagatgccgaaaagtcgaggaactgatcgcatactgccgaaagaactgccagtcgggtgaagctgtggaccttggcagagccgccttcaggacctccctgaacctcttgtcgaacacgatcttcagtaaggacctcactgacccatactcggacagcgccaaggaattcaaggacctggtgtggaatattatggtggaggccggcaaacctaatctagttgactttttccccgtgctcgagaaggtcgacccccagggcattcgccgtaggatgaccgttcatttcgggaaggttatccagctcttcaacggccttatcaatgagcggctagacaagagaaagagtcggggcggttacaacgatgtgttggatgtgctgcttaccactacagaagagaaccctgaagagatcgatcggacccacattgagagaatgtgcctagatctgttcgtggctggtacagacacgacctcgtctacactcgaatgggcaatggccgagatgctgcgcaatccagagaaaatgaagaagactcaggaggagctcgcagaggttgtcggaagaggaaaactaattgaggagggtgacgtctcgcgactcccgtaccttcgatgtgtggtcaaggaaactctgcgggtccacccccccgttccctttttaattccgcgaaaggtggtacaggatgtcgaggtgtgtggttacaaggtacccaaaggatcgcaagtgctcgtaaacgcttgggccattggccgggacgagactttctggaaggacgccctgggatttaagccggagagattcctggagtccgagctggatacgcgaggacgtgacttcgagttgattccttttggcgccggcagacgaatctgccctggtcttcctttggcgaaccggatggtgcctgtgatgttgggcagtcttctgaactcgtttaactggaagctggagggaggaattgcccccaaggacctggacatggaggaaaagttcggtatcacccttcagaaggctcacccactccgagcagtgccctctcccctg

SEQ ID NO: 1103 - DNA, 1479 bp, Ophiorrhiza pumila
atggactacctgactattgccttggggctgcttttcgcccttaccctgatccagggttggtcttttctctcgcgaagatccaagaagctgcctcctggaccaactccgctgccaataatcggaaatctgcatctccttggggaccagcctcataagtccctcgccaagctcgcaaaaacccacggccccctcatgtcacttaagctcggtcagattaccaccctcgcaatctccagttctggcatggcaaaggaggttctgcagaaacaggatctagctttcagctcccgatctattcccgacgctatccacgcccataaccagttccagtactctgtggtctggcttcccgtggctacccgatggcgaagtttgcgcaagattctcaactctaacatcttctcgggcaaccgactggacgctaaccagcacctgagatgccggaaggtgcaggaactcatcgcttactgccgaaagaattgtcagacgggagaggccgtcgacataggtcgcgctgccttccggacatcgctaaacctcctatcgaacacgattttctccaaggatttaactgatccatacagtgattccgctaaggagtttaaagacttggtgtggaacatcatggttgaagccggaaagcctaatctcgtagactttttccctgtcctcgagaaattcgacccccagggaatccggcgaagaatgaccatccatttcggaaaggtgctggagatgttcggtggactgatcaacgagagactggacaatggcaaatccagaggaggtaacaacgatgttctggacgtcctcctcaacgcttctgaggagacaccggatgagatcgatcgcacccatatcgagcgactgtgtctcgaccttttcgttgctggtactgacaccacctccaacaccctcgaatgggctatggcggagatgcttaagactcctgagaagatgaagaaggcgaaggcggagctcgctgaggtcattggcaagggcaaggctatcgaggaagctgatgtgtcacgacttccctacctcagatgtattgtcaaagaaaccctgagattgcatccacccgtcccctttctgattccccgaaaagtcgagcaagacgtcgaggtgtgcggctataacgtgcctaagggaacccaggtgttggtgaacgcgtgggctattggccgtgacgagaccacctgggaaaacgccctcgagtttaaacctgagcggttcctggagtcggagcttgacattagaggccgtgacttcgaacttatcccattcggtgccggtcgacgaatctgtccaggtcttccgctcgcggtgcgcatggtccctgtgatgcttggctctcttctaaactccttcgattggaagctcggaggaagcatcgcccctaaggaccttgacatggaagagaaattcgggattaccctgcagaaggcgaaccccctgttggctgtgcccatttcctta

SEQ ID NO: 1104 - DNA, 1479 bp, Rauvolfia serpentina
atggattaccttacaattactttgggactcctcttcgccctcaccttctatcagggactgtcctacctgtcacgacgatctaaaaagctcccccctggaccggctccccttcccatcatcgggaacctccacatgctgggggatcagccccataagtctctggccaagctctcaaagaagcatggtccgatcatgtctcttaagctgggacaaatcaccacagttgtggtgtcttcttctggaatggctaaggaagtcctgcagaaacacgacttggcctttagtagtcgatctattcctaacgccctgcacgctcataaccagtatcagttcagcgtcgtttggctccccgtcgcttcccgttggcgatcgctgcgaaagaccctcaactcgaacattttctcgggtaacaggttggatgccaatcagcacttgagatcccgaaaggtcgaagagttaatcgcttactgccgaaagaactgtcagacaggcgaggccgtcgacgtcggccgggcagccttccggacatcgttgaacttgctctccaacctcatcttctccaaggatctgaccgatccttattcggattcagctaaggaattcaaggacctcgtctggaatatcatggtcgaggctggaaagccaaacttggtcgattattttcccgtactcgagaaagtcgaccctcagggcatcagacgacgaatgactgtccatttcggaaaagttctcaagctgttcgacggtcttgtgaatgagcgactagagcagcgtcgtagccgaggaggaaagaatgatgtgttggacgtgctgcttactaactcagaggagaaccccgaggagattgatcgaacgcacattgagcggatgtgcttggacctattcgttgcaggtactgatacgacttcatctactcttgagtgggccatggccgagatgctgaagaaccctgataagatgaagaagacgcaggccgagctagctgaggtgatcggcagaggtaaggcgattgaggagagcgacctccctcgactgccttaccttcgatgtgttgtgaaagaaaccctgcgaattcaccctccggtccccttcctgattcccaggcgagtcgagcaagacgttgaggtgtgtggctataaggtccctaagggatctcaagtcctggtcaacgcgtggacaatcgggcgagacgaggccgtctgggaggacgctctagcttttaagcccgaacggttcctcgagtccgagctggacattagaggacgagatttcgagttgattccattcggagctggtcgtagaatttgccctggtctacccctcgccttgcggacagtccctctcatggtcggctctctgctcaactcgttcaattggaagctggagggcggaatcacccctaaggacctggacatggaagaaaagttcggcataaccctgcagaaggcacatcctctgagagccgtgcctatccctttc

SEQ ID NO: 1105 - DNA, 1479 bp, Cinchona calisaya
atggactatctgacaatcgttctaggtctgctgttcgccctgaccctgtaccaaggactctcctctttatcccgcaaggctaagaagctgccccctggccccactcctcttcctatcattggaaacctgcacctcctcggtgaccagccgcataaatctctcgccaaactggccaagaagcacggccctctgatgtctctgaagctcggacagattactaccgtggtcgttacgtcctcggacatggcaaaggaggtcttgcagaagcaagacctcgccttctctttcagatctatccctgacgccctacatgctcacgaccaatacagatactctgtcgtatggctcccggtcgcgagtcgatggcgcagtttgcgaaagatactcaattctaacatcttctccggaaacagactggacgccaaccagcatttgcgtctcaaaaaggtccaggagctggtggcctattgtagaaaaaactctcaggttggagaagccgttgacgtcgggcgtgctgccttccgaaccagcctgaaccttctttcaaacactctcttctccaaggacctcaccgacccctactctgactccgccaaggagtttaaggacctggtctggaacattatgttggaggcgggaaagcctaatctggtcgatttcttccccgtgctggagaaaatcgacccccagggcatccgacgacgaatgactattcacttcggtaaagtgctgaagctgttcggcggcttagtggatgagagactggaacaaggcaagtccaagggcggtaactcagacgtcctggacgttctgctgactacctcggaggaggcccctggagagattgatcgaactcacatcgaacgaatgtgcctggacctgttcgtcgccggaactgatacgacatctaatactctggagtgggccatggctgaagttcttcgaaaccctgaaaagatgaagaaggccaaagccgaactagctgaggtgattggaaagggcaagctagtcgaggaagcggacgtctctcgactaccctacctgcgatgtatcgttaaagaaactctgcgtatccacccgcccgtccccttcctgatcccccgacgtgtggatcaggatgtcgaagtgtgtggatacaacgttccgaagggtagccaggtgttggtgaacgcgtgggctatcggtcgtgatgagaccgtctgggagaacgccttggcatttaaaccagagagattctgggagagcgagctcgacatccgaggccgagacttcgaactgatccccttcggtgccggtcggcgaatctgccctggactgcctctcgccgtgagaatggtgcccgtgatgttgggatctctgctcaacagctttgactggaagctcgaagcaggtatcgccccgaagggtctggacatggaggagaagttcggcatcacccttcagaaagcctaccccctccgagccgtgccaatctccctg

SEQ ID NO: 1106 - DNA, 1479 bp, Tabernaemontana elegans
atggactacctcaccctggtcctcggcctgcttttcgccctcacattctaccagggcctcagctacctgtcccgaaagagtaagaaactcccccctggtcccgcaccgcttccttttatcggaaacctccacctgttgggtgaccagccccataagtctctggctaagctctctaagaagcatggccctctaatgagtctcaagttgggacacatcaccacggtcgtcatttcctcttctggaatggcgaaagaagttctccagaaacaggatctagcattttcttcacgttcggtccctgacgctttgcatgctcataaccaattccagttttcagtggtttggctgcctgttgcctcccgatggaggtccctgcgcaagattctgaactctaacatcttttcaggaaaccgcctggatgcaaaccagcacctgcgatgccgcaaggtccaggaattaatcgcctattgccgaaaaaactgccagactggcgaggccgttgatgtgggacgagccgcctttcgaacctcgcttaacctcctctccaacaccattttctcaaaggatctgaccgatccgtactcagactctgccaaggagtttaaggacttggtctggaacattatggtcgaggcaggtaagcccaatctggtggactttttccctgtcctcgagaaggtggacccccagggaatccgaaagagaatgaccgtacacttcggtaaggtccttaagctgtttaatggattgattaacgagagactggaacagaagagactccagtcaggtaacaacgatgtgttggacgtactgctgacaacttctgaagaatctcctgaggagatcgatcggacccatatcgagagaatgtgccttgatctgtttgtggctgggactgacaccacatcatccacgctagagtgggcaatggcagaaatgttaaagaaccctgacaaaatgcagaagactcaggccgagatcgccgaggtaattggaaaggggaaggctatcgaggaggccgatgttgcccgattgccctaccttcgatgtgttgtgaaagagaccctgagaatccaccctcccgtgcctttcctgattcctcgaaaggtcgaccaagacgtcgaggtgtgtggatacaaggtccctaaaggctcccaggttctcgtcaacgcctgggccatcggacgagatggaactgtttgggaggatccactcgcgttcaagccggagcgttttttcgaatcagaaatcgacattagaggcagggactttgaggtcatcccatttggagcaggccggcgcatttgtcctggcctgcctttagcagctcgaatggtgcccgtcatgctgggctctctgctgaactcgtttaactggaagctggagggaggcatcgcccccaaggatcttgacatggatgagaagttcggcattaccttgcagaaggctcatccactcagagctgtcccttcccctcta

SEQ ID NO: 1107 - DNA, 1479 bp, Catharanthus roseus
atggactacctcactatcattcttactctactgttcgcgcttacactttacgaggcattttcttacctctctcgtagaacgaagaaccttcctcctggaccttcgccgctgccttttattggaagcctgcacttgctgggagaccagccccacaagtcccttgccaagttgtcaaagaagcacggtccaatcatgtccctgaaactcggacagattacaactatcgtgatatcctcgtccactatggcgaaggaggtactgcagaaacaggacttggcctttagttctcggtcagttcctaacgccctccatgcacacaaccagttcaagttttcagttgtttggctgccagtggcaagccgatggcgttctctgagaaaagtcctcaactcgaacatctttagtggaaatcggctcgacgctaaccaacatctgcgtactcggaaggtgcaggaacttatcgcttattgccgaaagaactcgcaatctggcgaagcagtcgatgtcggacgggccgccttccggaccagtctgaacctactatctaacctgatcttcagtaaggatctcacagacccctactccgactcggccaaggaattcaaggacttggtctggaacattatggtggaggccggaaagcccaacctcgtcgatttcttccctctccttgagaaggttgacccccagggaatccggcatagaatgaccatccatttcggcgaagtccttaagttattcggtggccttgtgaatgaacgcctcgaacaacgacggtccaagggtgagaaaaacgatgtccttgacgtgctgttgacaacctcccaggagtctcccgaggagattgaccggacccacatcgagagaatgtgcctcgacctcttcgtcgccggaaccgataccacctcctctacactggagtgggcgatgtctgagatgttgaaaaatcccgacaagatgaagaagacacaggacgagcttgcccaagtgatcggccgtggtaagacgatcgaggaatcggacattaatcgcctcccttatctgaggtgcgtcatgaaagaaactctgcgaatccatccccctgttccttttcttatccctcgtaaggtcgagcaatcagtggaagtgtgtggctacaatgttcctaagggctctcaggtcctagttaacgcttgggccattggcagagacgagacggtgtgggacgacgccctggcttttaagcccgagagattcatggaaagcgaactggatatcagagggagggatttcgagctaatcccctttggcgccgggcgacgaatttgccctggcctgccactcgccctccgaacagtccccctcatgctcggctcacttctcaactcgtttaactggaaactcgagggtggaatggcccccaaggatcttgatatggaggagaaatttgggatcacgctgcaaaaggctcacccactccgtgcagtcccctctacactc

SEQ ID NO: 1108 - DNA, 1479 bp, Catharanthus roseus
atggattacttaactatcatcctcactcttctgtttgccctcaccctttacgaagcattcagttacctgtcaagacgcacgaagaatctccctcctggcccctctcccctcccgtttatcggtagtctgcacctccttggagatcagccccacaagagcctcgcaaagctaagtaaaaagcatggcccgatcatgtctctcaagttgggacaaattaccacaatcgtgatttccagctccacgatggcaaaggaagtactgcagaagcaggacctggctttctcctctcggagtgtgcccaacgccctgcatgcccacaaccagtttaagttctctgtcgtgtggctccctgtggcttcgcggtggcgaagccttcggaaggtgctcaactccaacatctttagcggtaacagactggatgcaaaccaacatctccgtacacggaaggtgcaggagctgatcgcctactgtcggaagaactcgcaaagtggcgaggcagtcgacgtgggtcgagccgcattccggacttccctaaacctcctctctaaccttatattttctaaggatctaactgacccctattctgatagcgccaaggagttcaaagatctcgtctggaacataatggtcgaagctggcaaacccaacctcgtcgacttcttccctctcctggagaaggtggatccgcaggggatccgacataggatgactatccacttcggagaagtgctcaagctttttggaggactggtcaacgaacggcttgagcaacgtagatctaagggagagaagaatgacgtgcttgatgtgttgttaacgacttcccaagagtccccggaggagattgaccgaactcacattgaaagaatgtgtctcgacctgtttgtggccggtacggacacaactagttcgactcttgagtgggccatgtccgaaatgctgaagaatcccgacaagatgaagaagacgcaggacgaactggctcaggtgattggtagaggaaagacgattgaggagagtgacatcaacagactaccctacctccgatgtgtgatgaaggagacccttcgaattcacccccctgtcccatttctcatccctcgaaaggtcgagcagagcgtcgaagtatgtgggtacaacgttccaaagggaagtcaagttttggtcaacgcctgggctatcggacgggatgagaccgtgtgggacgatgcgcttgccttcaagcccgagagattcatggagtccgaactagacattagaggcagagacttcgagcttattcccttcggcgccggacgaagaatctgccctggtctgcccctcgcattgagaaccgtcccgctgatgttgggatccctgctcaactctttcaattggaagctggaggggggtatggcccccaaggacctcgatatggaagaaaaattcggaattaccctgcaaaaggctcaccccttgcgcgcggttccttctacgctg

SEQ ID NO: 1109 - DNA, 1479 bp, Catharanthus roseus
atggactaccttaccatcattctgacgctcctcttcgcgttgaccctgtacgaggctttctcttacctctcaaggcgaacgaagaacttaccccccggaccgagtcctctgccttttatcggatcgctccacctgctgggtgatcagccccacaagtctttggctaaactctctaagaaacatggtccaatcatgtcgcttaagctgggccagatcactacgattgtgatctcttcgtctacaatggcaaaggaggtgctgcagaaacaggatcttgcattctctagccggtccgtgcccaacgccttgcacgctcataaccaatttaaattttctgtcgtttggctgccggtggcgtctcgctggcgaagcctgcgaaaggtactgaactctaacattttttctggcaaccgactcgacgccaaccagcatctgcgaactagaaaagttcaggagttgattgcctattgccgaaagaactctcagtctggtgaggctgtcgatgtggggcgggccgccttcagaacctctttgaaccttttgtctaaccttatcttctctaaagatctgacagatccctactccgactctgcgaaggagttcaaggacctagtgtggaatatcatggtcgaggccggaaagccaaatctcgttgatttcttccctttgctcgagaaggtggaccctcagggaattcgacatcggatgacaatccattttggtgaagtgctgaagctattcggtggacttgtgaacgagaggctggaacagcgacgttcgaagggagagaagaatgacgtgctggacgtgttgctaacgacgtcccaggagtcccccgaagagatcgaccgtacccacattgaacgtatgtgcctggatctctttgtcgctggtactgacactacctctagcaccctagagtgggctatgagcgagatgctaaagaaccctgataagatgaagaaaacgcaggacgagctggcacaggtgattggacgaggcaagaccattgaagagtctgatattaaccgtctgccctacctgcggtgcgtgatgaaagagaccctgcgaattcacccacctgtgccctttctcattccacgaaaagttgagcagtccgtcgaggtctgtggttacaacgttcctaagggttctcaagtgcttgtcaacgcttgggccatcggcagggacgagaccgtgtgggacgatgctcttgcatttaaaccagagagattcatggagagcgagctggacattcgtggccgagactttgagctgattccctttggcgctgggcgacgaatttgccctggcctgcctttggccctgagaactgtgcccttgatgctgggttccttgctaaacagtttcaactggaagcttgagggaggcatggcgcctaaggatctggatatggaagaaaagttcggtatcaccctgcagaaggctcaccccctgcgggcggtcccgagcaccctc

SEQ ID NO: 1110 - DNA, 1479 bp, Catharanthus roseus
atggactacctgactatcatcctcacactgctatttgcactaactctctacgaggccttctcttatctgagccgccggacaaagaaccttccccccggtccctcccctctgccgttcatcggatccctgcacctgctgggagatcagcctcacaagtccctcgccaagttgtctaaaaagcacggaccgatcatgtccctgaaactcggacagattactaccattgtgatttcttctagtaccatggccaaggaggtgctccagaaacaggacctggccttctcctcacgatctgtgcccaacgccctacacgctcacaaccagtttaaattctcggttgtgtggctcccggtggcatctcgctggagatcactgcgtaaagtgctcaactccaacattttttccggaaatcgacttgatgccaaccagcacctgcgaacgcgaaaagtgcaggaactaatcgcctactgcagaaaaaattcgcagtccggtgaggccgtggacgtgggtcgtgccgcattcagaacctctctgaatcttctcagcaacttgatcttttccaaagatctaactgacccttacagcgattctgccaaggaattcaaggacctggtgtggaacatcatggtcgaagccggcaagcccaacctggttgatttcttccctctcttggagaaggttgaccctcagggtatccggcaccgaatgacgatccatttcggtgaggtactgaagctcttcggcggcctagtcaatgagcggcttgagcagcgacgaagcaaaggcgagaagaacgatgtcctggatgtcctgctcacgacctctcaggagtcacccgaagaaatcgatagaacccacattgagcggatgtgtctggacttgttcgtggccgggaccgacaccaccagttccaccctggagtgggccatgtctgagatgctcaagaacccggacaagatgaagaagacccaggacgagcttgctcaggtgatcggacgcggcaagacaattgaggaaagcgacattaaccgtctgccgtatctgagatgtgtcatgaaagagaccctgcgaatccatccccccgtgcccttcctcatccccagaaaggtggagcagagcgttgaggtgtgtggatacaacgtccccaaaggctcacaggttctggtaaatgcttgggcgatcggtcgagatgagactgtatgggacgacgctttagctttcaaacctgaacgcttcatggagtcggagttggacattcggggtcgagactttgagctgattcctttcggcgcagggcgacgcatttgtcccggtctcccccttgcccttcgtacggtgcccctgatgctcggaagcctgctcaacagtttcaactggaaactggagggggggatggctcctaaggatctggatatggaagagaagtttggcataactcttcagaaggctcatcctttgcgcgccgtcccttcgactttg

SEQ ID NO: 1111 - DNA, 402 bp, Catharanthus roseus
atggcgtctgaccagaagctgcacaagtttgacgaggtgtctaaacataataagaccaaggattgctggctgatcatcaacggcaaagtttatgacgttactcctttcatggacgaccaccctggtggtgacgaggttttgctcagcgctaccggtaaagacgcgacaaacgactttgaggatgttggtcattccgattcggctagggagatgatggacaagtactacattggagagatggatatggctaccgtccctttgaagcgtacttacattcctccccaacaggcacagtacaaccccgacaagacacccgagttcgtcattaagatcctacagttcctggttccactgctgatcttgggcctggccttcgctgtgcggcattacaccaaggaaaag

SEQ ID NO: 1112 - DNA, 330 bp, Yarrowia lipolytica
atgattattaacggtaaggtgtacgacatttcatccttcgttgatgaacatcctggaggagaggaagtgcttctggacgccggcggaacagaagccactaacgcttttgacgacgtgggtcattccgaggacgcctacggaatcctgaacgacctatacgtcggagaggtggatccgtcggaagatgtcattcgaaagacccataccgttaagacgtcatatgaggatggagagtcagtgggggatgaccacggctctagttctatgatcttcctcatcgttgccgccgcagttgccgccgccgcttttttctatctgcagggacagaag

SEQ ID NO: 1113 - DNA, 414 bp, Nepeta cataria
atgcccactcttacgaagctctacacgatggaagaggcctcccagcataataccaacgaggattgctggatcgtcattgatggtaaggtctacgacgtgtcaagctacgtcgacgatcatccgggtggagacgacattctagtaggcgccactggaaaggatgccactgacgagttcgaagatgcaggacactccaagtcagcacgagagttgatggagaagttctgcatcggcgaactcgaggaaactacccccagtatcccagagcttgacatcgttagtcagaagcagaagatgaatgatctcccccataagattctgaattttacgaagcagtattggttcgcctcgattaccgtcgccggtctctcagttgtcgtgggatacctttgcatccggaaaaagcagactaca

SEQ ID NO: 1114 - DNA, 402 bp, Catharanthus roseus
atggcgtccgatcaaaaattacataaatttgatgaagtatccaagcacaataagactaaagattgttggttaattattaatggtaaagtatacgatgtcactccatttatggatgatcatcctggcggtgacgaggttttgctgtctgcaactggcaaggatgcaactaacgactttgaagatgttggtcattcagactctgctagagaaatgatggacaagtattacattggggaaatggatatggcaaccgttccactaaaaagaacttacattccccctcaacaggcgcaatataatccagacaaaacaccagaatttgtgattaaaattctgcaatttttggttccattattgattttgggtcttgcatttgcggtacgtcattacaccaaagaaaaa

SEQ ID NO: 1115 - DNA, 414 bp, Nepeta cataria
atgccgacattaactaagttatacacaatggaagaagcttctcaacataatacaaacgaagactgttggatagtcatagatggtaaagtctatgacgtcagctcttatgtcgatgatcatcctggcggtgatgacatactagttggagcaacaggtaaagatgctacagatgaattcgaagatgctggtcattctaaaagcgcaagagaattaatggagaaattttgtattggggaattagaagaaaccacaccaagtattccagaattggatatcgtctcacaaaagcaaaagatgaacgatcttccacataagatcttgaattttactaaacaatattggttcgcatcaattactgtggcaggtttgtccgtggtcgttgggtatctttgcatccgaaaaaagcaaacaact

SEQ ID NO: 1116 - DNA, 408 bp, Artemesia annua
atggcatccgatcccaaaaattttgtgttcgatgatattagtaagcacaataagacaaaggattgttggcttattattgatggaaaagtgtacgatgtaaccccattcatggaggatcacccaggaggggacgaagtgctcctagcagctaccggtaaggatgcaacagacgactttgaagatgtcggtcatagcgacgatgcaagggaaatgatgcataaatactacattggtgaagttgataaagctactgttccgaaaaaaagagcctatgttcctccagccgatagacactacaatcctgataaaacccaagattttatcgtgaagatattgcagtttctcgttccgctagttatcttgggtctggccttcgccgtcagatcttatacaaaagaaagatcagca

SEQ ID NO: 1117 - DNA, 402 bp, Arabidopsis thaliana
atgtcttcagacagaaaggttctatctttcgaggaggtatccaaacataacaaaacaaaggattgttggctaataatctccgggaaagtgtatgacgttaccccattcatggacgatcatcctggtggtgacgaagtcttattgagcagcactggtaaagatgctactaatgatttcgaagatgtgggtcattcagacactgcaagagatatgatggataaatattttatcggtgaaattgatagcagttccgttcctgctaccagaacttacgttgctccacaacagccagcatataaccaagataaaacacccgaatttataattaagattttgcaatttctcgtgcctattttaatattgggtctggcactagtcgtcagacattacactaaaaaagac

SEQ ID NO: 1118 - DNA, 1080 bp, Catharanthus roseus
atggccaagtctcctgaagtcgagcatcctgttaaggcttttggatgggccgcacgggatacctccggccacctctctcctttccacttttcccgacgtgcgaccggcgaacacgacgtccagttcaaggttttgtactgcggaatttgtcatagcgacctgcacatgatcaagaacgagtggggtttcaccaagtatcccattgtgcccggccacgaaattgttggtatcgtgactgaagtgggttctaaggtggagaagttcaaggtcggtgacaaggtgggagtcggatgtctcgtgggatcttgcaggaagtgcgatatgtgtactaaggacctcgagaattattgtccaggacagattctgacttactcggctacgtacaccgacggcactaccacctatggaggttacagcgacctgatggttgctgacgaacatttcgtgattcgatggcctgagaacctgcccatggacataggagctcctctcctctgtgctggaatcactacctactcccccctacgctacttcgggctggacaagcccggaacacatgtgggcgtggttggtctgggtggccttggacacgtcgctgtgaagttcgctaaagctttcggtgccaaggttaccgtcatctctacttctgagagcaagaagcaagaggctcttgaaaagctgggtgccgattcgtttctggtttctagagaccccgagcagatgaaggccgctgctgcgtctctcgacggaatcatcgacacggtttcggctattcacccaattatgccgttgctatctattctcaagtcgcacggtaagctcattctggtcggcgctcctgaaaaaccgctagaattaccctcttttcctttgattgcagggcgaaagattatcgcaggctctgccatcggaggactaaaggaaacacaggaaatgatcgatttcgcggctaagcataacgtgcttcccgacgttgaattggtctcaatggactacgtcaacaccgctatggagcgactgctgaaggcagacgtgaagtaccgctttgtgattgatgtggctaacactttgaagtccgcc

SEQ ID NO: 1119 - DNA, 1134 bp, Catharanthus roseus
atgacaaagactaattctcccgccccctctgttattacttgtaaagctgctgtagtctggaaatccggcgaacctcccaaggttgaagagatccaagtcgatccaccgaaagcttccgaagttagaattaaaatgttatgcgctagcttatgtcacaccgattttctcgcctgtaacggactgcccgttcccttgttccccagaattccaggtcatgaaggcgtcggtatgattgagtcggtcggtgaaaacgtcacgaatctgaaagaaggagatatagtgatgcccctgtacttaggtgaatgtggtgagtgtctgaattgcaaatctggcagaaccaatttgtgccataaataccctttgggcttttctggcctccttttggatggcaccagccgcatgagtattggagaacaaaaggtttaccatcacttcagctgttctacgtggtccgaatacatcgtaattgaagctgcatacgcagttaaggttgatccaagagtgtcattgccacacgcttcttttttatgttgtggtttcactacaggttttggtgctacctggcgagatgtcaatgtcgttaaaggcagtaccgttgccgtgttaggtttaggtgcagttggtctaggcgctgttcaaggcgctaaatcacagggtgcaagcagaataattggtttagacataaatgataaaaaacgagagaagggtgaagcgttcggtatgactgaattcatcaaccctaaaggctccaataaaagcattagtgaattaatcaatgaagcaaccggtggtttaggattggactacgtttatgaatgtacaggagtgccagcgttattaaatgaagccattgaatcctccaaagtgggtctgggaacagctgtactgataggtgcaggcttggagacaagtggcgaaatcaaatttatacctcttttatgcggaagaactgttaaggggtccatctacggtggagttcgtccaaagagtgatttaccaacactgattgaaaagtgtatcaataaggaaatccccatggacgaattaatgactcatgaagtgtcactatctgaaattaacaaaggtttcgagtatctaaaacatcccgactgcgtgaaagtagttataaagttt

SEQ ID NO: 1120 - DNA, 1128 bp, Nepeta cataria
atggcagataatacgaatccaggcgttataacatgtaaggccgctgttgcttggaagccactggaaccgctaaaggttgaagaaatccaaattcaaccgccaaaaccgacggaggttcggatcaaaatgttgtacgcgtcgatttgccatacagacacggtctgctggacggggattctttatgatatgtttcctagagttctgggtcatgaaggtgtaggggtcattgagtctgtcggagaagaagtcaccgacttaaaagtaggtgatactgttatgccattgtatgttggcgaatgtgggaaatgcccaaattgtgcgtctggtaaaagtaacttctgtagcaattatcccctgacactaggtctgatggcggatggtactacgcgtatgagcgctaaaggtcaacaattgtatcaactgttttcttgttcaacttggtctgaatacgcagttattgagtccaattatgttgttaaagttgaccctaagttgtcattatcgggggcctccctactcacctgtggtttcactaccggttatggtgccgtttggaaggttgttaattttgaaaagggctccactgtggcagttgtcggactaggagccgtcggtttcggagctgtgaaagctgcgcaaatattaggtgcatcaaaaattattggcgtagatataaacgaaacacgaagggataaagcaaaggccttaggagttactgactttatcaacccgaaaagttctgataaaaccatgtcacaactaattcaggaggccacagggggtctgggggttgactgttgtatcgagtgcactggtgttccgtccctcctaaatgaggctatagcttcgacgaaggtaggatcaggtgaagtcgtattgattagcgctggggatgagcagaatactgaacttaattacgttccgttattattaggaagaacagtaaaaggcaccatatacggaggtgttcgtatacattctgacctacacaaaattgttgacaagtgtatttctaaggaaattgatttagacgagataataactcatgaggtgtctttagctgatgtaaataaaggttttttggagtatatgaagcaaccagactgtgtcaaagtgatcattaagttt

SEQ ID NO: 1121 - DNA, 1131 bp, Sesamum indicum
atggctaatacttctagtacttctccagtaataacctgtaaggctgccgtgattaggaaacccggggaaccacttcaggtggaagaaattcaagtggatccacctaagccaactgaggttaggataaagatgctatgcgccagtatgtgtcataccgatatcttatgttgtaatggctttcccgcacctctgttccccaggattccaggacatgaaggcgttggtgttgtggagtctgtaggtgatgaagtaacacatgtaaaggtcggtgatacggttatgccactttacctcggagaatgtggtgaatgtcaaaattgttcttcaggccgtacaaacttatgtcataaatatccattagatttcagcggtttgatggcggatggcacaagcaggatgagcgtgggtggcgaaaaaatataccatgtattctcgtgttccacttggagtgaatatatcgttctcgagagctactatgccgttaaagttgatcctcggttgtcgcttccacacgcctcctttttatcttgtggctttacaactggctttgggtcgacatggagagaagttaatgtaaaaaaaggatcgacagttgccgttataggtctaggtgccgtgggtctaggcgcagtcaagggtgcccagatacaaggcgccgcaaagattattggtatagatattaatgaattgaagcaagaaaaagccaaggctttcggaataaccgaattcatcaaccccaaattatctgacaggagcgtttctgaattaattaaagaagccacaggtggcttaggtgtggattactgcatagaatgtacgggtgtgccagcattgctgaacgaagcaatcgaagggagtaaggttggtttaggcacagttgttctgataggtgctggcctagagaaatctgtagaattaaattatatccccctactatgtggtagaactgttagaggttcaatctacggtggagttagagcacaatccgatctgcctaaaattgtagagaaatgtgttaacaaagagatcgatttggatcaccttatcacgcatgaagtgtcactggcagagatcaacaaagcattcgaatatatgaaacatcccgattgtgttaaggtggtgattaaattt

SEQ ID NO: 1122 - DNA, 1125 bp, Camptotheca acuminata
atgtcaaaaacatcgagtcaagttataacgtgcaaagccgccgttagttggggtgctggcttgccgctaaaagtcgaagaaatccaagtggaaccccccaaaagctctgaagtccggttgaaaatgctatgcgcatctttgtgccatacagatatactttgttgtaatggtctcccagtcccattattcccgagagtacctgggcatgaaggtgtcggcatggttgaatctgtaggagaaggtattaccgggttaaaggaaggtgatatagtgatgccaacatacattggtgaatgtggcaaatgtgaaaattgtatgtctggaaagtctaatttatgtctcgcgtatcccctgccattcagtggcctaatgcctgacggaacaagtcgtatgtccatcaatggtcaaaaactttaccatttcttttcctgcagtacttggtccgaatacattgtgattgattcaaattacgttgttaagttggatccgaggatatcccattcccacgcgtcatttattagctgtgggttttccactggttttggcgctacctggaaggaagttaatgttgaaaaaggaagctccgtagctgtctttggtttgggagcagtcggcttaggcgtagtcgagggtgcaagaatgcaaggggcttctaaaattatcggtgtagatattaatgagaagaaacgtgtgaagggacaggtctttgggttaactgattttattaatccatcaggttcagataaaagtataagcgatttgattaaagatttaactggtggtacgggtgtggactactgtttcgagtgtactggggttgctaccctagttaacgaagcacttgaagcaacaaaggtgggtattggtacttccgtcttaattggtgcaggtcttcaacagagcggtatgattaattttgttccattactctgtggccgtactttgaagggttccatttatggtggagtaaaaattcaatctgatctaccaattatattcgagaaatgtataaataaagagattaacttggatgaactattaactcatgaagtatcactggatgaaattaataaagcttttcagttattaaagcagcctgattgcgtaaaagtgctaattaaaata

SEQ ID NO: 1123 - DNA, 1131 bp, Sesamum indicum
atgacggatggaaccacaacgccaccagtgattacatgcaaagccgcggtgttacgcaaatctggtgaacctttgcaagtcgaagagattcaggtagacccacccaaatccactgaggttcgcattaagatgctttgtgcatcaatgtgtcacaccgatattctatgctgtaatgggttacccgtgccattatttcctagaatacccggccacgaaggagtgggcgttgttgaaagtgtcggtgatcaagtaacacacgtcaaggttggtgatacagttatgccactctacttgggcgaatgcggcgagtgcttgaattgttcaagtgggcgtactaatttatgccataaatatccgttgggcttttctggactaatggccgacggtacgtctagaatgtctgttggaggcgaaaaaatttatcatcatttttcatgttcaacatggtcagagtacgtcgtgatcgaagcaaattatgctgttaaagtcgacccaagagtctctctaccacatgcaagcttcttatgttgcggattcactactgggtttggaagcacatggagagaggttaatattgagaagggatctactgttgctgttataggcctaggggctgttggtttaggagctgttaaaggtgcccagatgttaggggcttctaaagttattggtatcgatattaacgaacttaagcatgaaaaggccaaagcgttcggaataactgaattcattaacccaaagctatcggacaaatctgtatcagaattgatcaaagaagctacgggtggcttaggggttgactactgctttgaatgcacaggcgttcctgctctgttaaacgaagctatagaaggatctaaggtcggtctaggcactattgtttttataggtgcgggattagaaaaatctggggagttgaattatattcccttattatgtggtagaactgttcgtggatcaatatatggcggggtaaggacgcaaagcgacttacctaaaattgttgagaagtgtgttaacaaggaaatagatttggatcaattgattacccacgaagtatcattggccgaaattaataaagggttcgagtacatgaaacagccagattctttgaaagttgtcatcaagttc

SEQ ID NO: 1124 - DNA, 1125 bp, Swertia japonica
atgaccatatcatcccccgctgttgttacttgcaaggccgctgtgatatggaagtctggagaaccagcgaaggtggaagaaatacaagttgatccaccaaaagctggtgaaattcgtgtaaagatgctttatgcttccctatgccatacagacgttttgtgctgcaatggtttacctgttcctttgtttccgagaattccgggtcacgaaggagttggtaccgttgaaagtattggtgagaacgttactaatgtgaaagagggggatattgttatgccattatatttaggcgaatgtggtgaatgtcttaattgcaagtcgggccgtagcaatttatgtcataaatacccattgggattctccgggctgctattagatggtacatctagaatgtcaataaagggggaaacagtatatcaccatttttcgtgtagcacttggtcagaatatattgtaattgaagcagcttatgcatttaaagttgatccaaagatgagtttgccacatgcctctttcctgtgctgtggatttacgactggctttggcgctgcctggagggaggtatgcgtggaaaagggtagcacagtggcagttttgggtctaggcgctgtaggtcttggcgttgtcgaggcagcaagagttcaaggggctagcagaatcataggattggacataaatgacaaaaagcgtgaaaaaggcgaagctttcggtataactgagttcattaatcctactggaagcgaaaagtcggtttcacaacttattttagaagcgacaggaggtttaggtgtagactattgctacgaatgtacaggagttcccgcgttgttaaacgagagtatcgaggctagcaaagtcggtttgggcacagctgtcttaatcggtgcagggttcgagactagcggcgttattaacttcatccctctattgtgcggtagaacgttgaagggttcaatctacggtggaatcagacctaactccgatctacctgctatagtagataagtgcatttcgaaggaaattaatcttgacgaactgcttacacatgaagtaagtctgtccgaaattaataaggctttcgagtaccttaaagatccagattgtgttaaggtagtcattaaattt

SEQ ID NO: 1125 - DNA, 1125 bp, Ophiorrhiza pumila
atgaccaaacgttctccatctgttataacatgtaaagcagctgttatttggaaaagtggggaagcagctaaagttgaggagatccaagtagaacctcctaaatcctccgaggtcagaatcaaaatgttatgcgcttccctgtgccatacagatatactttgctgtaacgggttacccgttccgttgtttcctagaatccccggccacgaaggtgttggtatggttgaatcggtgggggaaaacgtcacgaatttgaaagaaggtgatatagtcatgcccctttatttaggtgaatgcggtgagtgtttaaattgtcaatccggtaaaactaatctgtgccataaatatcctctcggcttttcaggtttgctgcttgacggtacatcaagaatgtccataggtggtcaaactgtatatcatcacttctcttgctcgacatggagtgaatacattgtgatagaggcaccatatgcagttaagatcgatcctagattatcacttccccatgctagttttctttgttgtggtttcactactggttttggcgcgacatggagagaagtgaacgtagtgaaagggtctacagttgcagttcttgggttgggcgctgttggcttaggtgttgtcgaaggtgcccgaatgcaaggcgcgagtagaatcatcggtatcgatatcaatgacatgaaaagagaaaagggagaagcgtttggaatgacagaattcataaaccctaaacacagtgaaaagtctatctctgaattgataaaagatgtcaccggtggactcggtgtagattattgttacgaatgcactggtgtaccagccctgctaaatgaggccatcgatgcatctaaggtcggtttgggtacagcagtgttgataggcgcaggacttgagacttcagggcaaattaactatattccattgttatgtgggagagttttaaagggctccatttacggtggagtcagaccattatccgatctacctacaattattgataaatgcattaacaaagaaataccacttgatgaacttatgactcatgaagtgtctctggatgagatcaataaaggttttgaatacttgaaacaacctgattgtgtaaaagttgtcataaagttc

SEQ ID NO: 1126 - DNA, 1125 bp, Cinchona ledgeriana
atgactaagtcttcacagggcgtcatcacttgtaaagccgccgttatttggaagagtggagagccaccgaaggttgaagagattcaggtcgatcctccaaaggcttctgaagtaagaattaagatgctatgtgcttctttgtgtcacaccgatatcttatgttgtaatggtttaccagttccactgtttcccaggattccaggccacgaaggggtaggtatggttgaaagcgtaggagagaatgttaccaatttaaaggaaggtgacattgtcatgcctctttacctgggagaatgtggcgaatgtttgaattgtaaatcgggtcgctcaaacttatgccataaatacccgctaggtttcagcggattattattggacgggacttctagaatgtcaacaggtggacagacaatctatcaccatttctcttgctctacctggtctgaatacatagttatcgaagctgcttatgctgctaaagtagatccaagaatttcatttcctcatgccagctttttgtgttgtggctttacgacagggttcggagctacctggagagaagtgacggtggaaaaggggagcactgttgccgtcttgggactaggtgctgttggtttgggagctgttgccggggcgcgaactcaaggtgcaactaggataataggtgtcgacataaacgatatgaaaagagaaaagggtgaagcttttggcataaccgagtttatcaacccaaaggattcggataaatcaatttctgaactaataaaagatgctacgggcggattaggcgtggattactgttacgaatgcacaggtgttcccgcgttattgaacgaagcaattgatgcaagtaaggtgggtttgggtaccatagtgttgattggagcgggtttaaagacgtctggcgaaatcaactatatcccacttttatgtgggcgaactctaaaaggttctatctatggcggtgttcgtccgcagtctgatttaccgagcattgtcgataagtgtattaataaggaaatacaacttgatgaattgattacccatgaggtaagcttacacgaaattaaccgtggttttgagtatttgaaacaacccgactgtgtgaaggtggtaattaaattc

SEQ ID NO: 1127 - DNA, 1134 bp, Lonicera japonica
atgactaaatcctctagcgaagttattacatgtaaagctgcagttatctggaagtcaggtgaaccagccaaggtggaggaaataaaggtagaccctcctaagtcctctgaggtcagaattaaaatgttgtgtgccagtctatgtcataccgatatcttatgttgtaacgggctcccggtgccccttttccccagaattccaggtcacgaaggtgtgggtatggttgaatcagttggtgaaaaggtaacagacgtaaaagaaggagatatcgtaatgcctctttaccttggggaatgcggagagtgtctcaactgcaaatccgaaaaaactaacctgtgccataagtacccattggatttcagtggggtcctgccatcagatggcacttcccggatgtcaattgcaaaatctggggagaaaatttttcatcatttctcttgcagtacttggagtgaatatgttgttatagaatcatcctacgtggtaaaggttgatcctagactccctttggctcatgcgtcattcctggcctgtggattcacaaccgggttcggagctgcatggagagaagctaacgtacacaagggtagcacagttgctgttttaggcttaggcgctgttggtctcggagtggtctctggggctaaggtgcaaggtgcatctaaaattatcgctgttgacataaacgacatgaaacgtgaaaaaggagagtctttcggcatgacagactttctcaatcctaaggaatccggtaaatcagcctctgaactaattaaagaggctaccggaggtttaggtgttgactattgctttgaatgcactggtgttccagccatgttaaacgaagccattgacgcaagtaaggtgggtttgggtacgattgttttaattggtgcaggaatggaaacgagtggcgttattaattacattcctttgctttgcggcagaaccttgaaaggtagtatatatggaggtgtaaggatccagtcggatttaccggttataattgaaaaatgtattaataaggaaattcaattagacgaacttcaaacccatgaagtatccttggaagaaattaatgaggcctttggacttttgaaacatccagactgtgttaaagtggttattaaattc

SEQ ID NO: 1128 - DNA, 1125 bp, Coffea canephora
atgaccaaaagtacgccatctgtcgtcacctgcaaggccgccgtggtttggaaatcgggtgagcccccaaaaatcgaagagatccaagttgaccctccaaaagcatcggaagtgcgcgtcaaaatgttgctggcctccttatgtcacacagacatattatgttgtcacggtttacctgtacctttattcccgagaatcccaggtcatgagggagttggaatggttgaatcagttggcgaaaacgttactaatttgaaagagggggatattgtaatgcctttgtatcttgctgaatgcggcgagtgcctaaactgcataagtggcaaaaccaacctgtgccataaatatcccctgggtttcagcggattgttattagacggaacttctagaatgtctatcagaggacaagccatctatcatcatttttcatgctctacatggtcagaatacattgtcatcgaggcaccatacgccgtgaaggttgacccaagagtttcattaccacatgcttcctttttatgctgcggttttacaacgggtttcggtgccgcctggagagaaatcacggttgaaaaagggtctacggttgcagttttaggattgggcgctgtaggtctgggtgtggcagggggtgcacgaatgcaaggtgcgtctaggataattggtgttgatagaaacgaaatgaaaagggagaaaggtgaggctttcgggatgacagagtttataaatcccaaaggttcagataagtcaatttctgacttgattaaggaagttacgggtgggctaggagttgactactgttttgagtgcactggggtaccagatttactgaacgaagccattgaggcatctaaaataggtttgggtacgtcggtgctaattggtgccggttttgaaacttccggtgattttaagtatattccattaatttgtggcaggactcttaaaggttcaatctatggcggtgttagaccaaaaagtgacctcccactgttattagaaaaatgtgccaacaaggagatccccttggatgaactaatcacccatgaagtaacgttggacgaaataaaccgtggattcgagtacctcaaacacccggattgtgtcaaagttgttgtaaaattc

SEQ ID NO: 1129 - DNA, 1125 bp, Rauvolfia serpentina
atgactaaatcgacaccaactgttattacttgtaaggcagctgtactatggaaggcaggtgaaccacctaagatcgccgagattcaagtagacccaccgaaggctccagaagttagggtgaaaatgctatgtgcctcattatgtcatacagattttttgtgctgtaacggtttgcctgtgcctttatttcctaggatcccaggccacgaaggtgttggaatgatcgaaagtgtgggagaaaacgttagagacttaaaggagggcgatatagttatgccgctttatctgggtgaatgtggggagtgcttgaactgtaaatctggtaggagtaatctttgtcacaaatatccattagggttttctggtcttttattagatggtacttcaagaatgtccatcggtgggcagaaagtttatcatcactttagctgttccacctggtccgagtatatcgtgacagaagctgcatatgctgtgaaggtggatcctagagtctctttgcctcatgcctcctttttatgttgtggtttcacaacaggctttggtgccacgtggagagagatcaacgtagaaaagggatcaactgttgcagtattgggattaggagcagttggtctgggcgcggtacaaggcgcaagaagccagggagcctcaagaattattggagtggatattaatgataaaaagagaaagaagggtgaagcgtttggcattaccgaattcataaatccgaaggggtcgaataaatctgtatcgcagttgatcaaagacgctactggtggattaggtgttgactatgtctatgaatgcacaggtgtgccggctctactaaacgaagctatagaggcgagtaaagtaggtctgggcacctcagttttgataggtgccgggctagagacaagtggagagataaagtttatcccattactttgcggtagaacagtgaagggtagcatatatggtggtgttaggccgaagtccgaccttcctaccattattgataaatgcataaacaaagagattcctatggacgagttattgacccacgaagtctccttgagtgaaattaataaagcttttgaatacttgaagcaaccagattgcgtcaaggtggtaattaaattt

SEQ ID NO: 1130 - DNA, 1128 bp, Gentiana rigescens
atgaccaagacaattaccccggctgtgattacttgtaaggcagcagttatctggaagtctggtgaacctgcaaaggtcgaagaaatacaagtagaaccacctaagactggagaggtcagagttcaaatgctgtatgcatccctgtgccatactgatgtattgtgttgtaacgggctgccagttccactttttccaagaattccaggtcacgaaggtgttggtgttgtagaatcagtaggggagaacgttaccaatttgaaggagggtgacattgtcatgccactttatttgggagagtgcggtgaatgtctaaattgtaaatcaggtaaatccaacctatgccataagtatcctcttggcttcagtggtttgcttctcgatggtacctccagaatgtcaataaagggtcaaactgtctaccatcacttttcttgtagtacttggagcgaatatatagtcattgaagctgcttacgctttcaaagtggatccaaagatttcgttgccacatgctagttttttgtgttgcggttttaccactggattcggtgctgcttggagagaagttgtaatagaaaagggtagcacagtcgcagttttaggattaggggcggtcgggttgggagttgtggaagctgcccggattcaaggagcaagtagaatcatcggtttagacataaacgataaaaagagagaaaagggtgaagcctttggattgaccgagtttatcaatccaagcgggtcagacaagtctgtctctcaacttattaatggcgtcacaggtggattaggtgttgattactgttatgagtgcacgggtgtccctgctttgttaaacgaagcaatagagagctctaaagtgggtctaggtacagttgttctaattggtgctggtttcgaaactagtggtaccattaatttcataccattgttatgtggtagaaccgttaaaggttctatatacggtggtgttaggccaaattctgatttacccgcaattatcgctaaatgtgtgaataaggaaattaatttagacgaattgctgactcatgaggtggcattaagcgatatcaataaaggttttgagtaccttcatgacccagactgcgtgaaggtggttataaaattc

SEQ ID NO: 1131 - DNA, 1134 bp, Catharanthus roseus
atgacaaagactaacagtccagccccatcggttattacatgtaaagccgccgttgtctggaaaagcggagaacctccaaaagtggaggaaattcaggtcgaccctcccaaagcaagtgaagtccgtataaaaatgctgtgcgcttccttatgtcacactgattttttagcgtgcaatgggttgcctgtgccgttattccccagaatacctgggcatgaaggagtcggaatgattgagagcgttggtgagaatgtgacgaacctaaaggagggagatattgtaatgcctctttatctaggtgaatgcggagagtgtttaaactgtaaatccggtagaacaaacctatgtcacaaatatcccttgggtttttcaggacttcttttggacggtacatcacgtatgtccatcggcgaacaaaaggtctaccatcattttagctgctctacctggtcagagtatattgttatagaggcggcttacgctgttaaagtcgatccaagggtgtcacttccacatgcttcgtttctttgttgcggatttactaccgggtttggcgctacttggcgcgatgttaatgtcgttaaggggagcacggtggccgtcttgggcctcggtgcagtcggacttggtgcagtacaaggcgcgaaaagtcaaggcgcttcgagaatcattgggttggatataaatgataaaaagagagagaaaggcgaagcgtttggtatgactgaattcatcaacccgaaaggttcaaataagtctatttctgaattgattaacgaagccactggtggtttaggacttgactacgtgtatgagtgcactggcgtccctgccttattaaatgaagctattgagtcttccaaagtaggtctaggtaccgctgttttgattggggctggactagaaacaagtggtgaaattaaattcattcccttattatgtggtaggacagtaaagggtagtatatacggtggggtgagacctaagagtgaccttccgacattgattgagaagtgtataaataaggagattcctatggatgaactgatgacccacgaggtttctctcagcgaaataaacaaaggctttgaatatctaaagcatccagattgtgtaaaggtggtgattaaattt

SEQ ID NO: 1132 - DNA, 1128 bp, Nepeta cataria
atggctgacaacaccaacccgggagttatcacctgtaaggctgcagtcgcatggaagcctcttgagccactcaaggtggaggagatccaaattcagcctcctaagcccactgaagttcgcattaagatgctgtacgcttctatctgtcacacagacaccgtctgttggaccggcatcctttacgacatgttcccgagggtcttgggtcacgaaggtgtcggcgttattgagtctgtaggtgaagaggtaaccgacctaaaggttggtgataccgtgatgcctctctacgttggagagtgtggcaaatgtccaaactgtgcatccggaaagtccaacttctgttccaactaccccctgacactgggcctcatggccgacggcaccacgcgaatgtccgccaaaggtcagcagttgtaccagctattttcttgttccacctggtctgaatatgcagtgattgagtccaactacgtggtcaaggttgatcccaagcttagcctgagtggtgcatctctgcttacctgtggattcactacagggtatggcgccgtctggaaggtcgtcaacttcgagaagggctctaccgtggctgtcgtaggtcttggagcagtcggtttcggtgctgttaaggcggctcagatcctgggcgccagcaagattatcggtgttgatatcaacgagaccagacgagacaaagctaaggccctcggagtgaccgactttattaatccaaagagttctgacaagacaatgtcccagttgattcaggaggctactggcggcctgggagtggactgttgtattgagtgtactggcgtgccttctctgttaaatgaggcaatcgcttctacaaaggtcggttctggagaagtggtccttatttctgcaggagatgaacagaacaccgagctcaactatgttccccttctcctcggtcggaccgttaaagggactatttacggcggagttcgaattcattccgacctccacaagatagtggacaagtgtatctcaaaggagatagatttggacgagattataacccatgaagtctcgttggctgatgtcaacaagggtttcctcgagtacatgaagcaacccgactgcgtcaaggtgatcatcaagttt

SEQ ID NO: 1133 - DNA, 1128 bp, Ocimum basilicum
atggcgaacaatacgaacgccggcgtcatcacctgtaaagctgcagcagcatggaaaccatcggagcccctggtggtcgaggagatctgcgtggaaccccccaagtcaaccgaggtgcgaattaagatgctagcagcatccatgtgtcataccgacattcttctctggaagggattcttccccctgtaccctcgaatcccaggacacgagggcgcgggcgtcatcgaatccgtgggagagaaggttgcgaacctcaaggtgggtgatacggtcatgcccttgagcattgggcagtgtggcgagtgctccaactgtgctactggcaaaacaaacatttgcttcaaatacccattcggcattagcggactgatgcctgacggaacttcacgtatgtctgccaaaggtcagaaattgtaccatatgttcacctgctctacctggtctgagtacactgtcgtcgacagcaacttcgtggtaaaggtggatccccgaattcccttgccccacgcgtccctcctaacgtgtggatttctcacaggatatggagctccctggcgtgaatccagagtggagaagggtagcactgtcgccgttatcggattgggtgctgtgggtctcggcgccgtgtctgctagccgtattctaggagcctcgaagattatcggaattgacgtgaatgagcttaagcgagagaaggccactgttttcggcgtaacggagttcattaacccgaagcactcggataagactgtctcccagctcatccaggaggcaactggaggtttgggtgtggattgttgtatcgagtgtactggagtctcgtcgctgctaaacgaggccatcgcttcgaccaaggtaggcattggcgaggtggtcctcattggtgccggcgagaaggagaaggtcgaaatatcttacatcccactcatgcttggacgcagtgttaagggcaccacgctgggaggagtccgtatacactcggacttaccgaaaatcgtcgaaaagtgcattaacaaggagattgaccttgacgagctcattacgcatgaagtgagtctggtggacgtgaacaagggcttcatggagtatatgaaccagcccgactgtgttaaggtctcggtgaagttt

SEQ ID NO: 1134 - DNA, 1131 bp, Sesamum indicum
atggccaacaccagctccacttctcctgtcatcacatgtaaggctgccgtcattcgaaagccgggagagcctttgcaggttgaggaaatccaggtcgatcccccaaaacctactgaggtccgaattaaaatgctgtgtgcgtctatgtgccacaccgacatcctctgttgtaacggttttcccgcccccctgtttcccagaattcccggtcacgaaggtgtgggagtggtggagtctgtaggtgacgaagtaacccacgttaaggtcggtgacacagtgatgcccttgtatctcggcgagtgcggtgagtgccagaactgcagttctgggcgaaccaacctctgtcataagtatcctcttgatttcagcgggctaatggcggacggaacctcacgaatgtccgttggcggtgagaagatttaccacgtgttctcttgctctacttggtctgagtatattgtccttgagagttattacgccgtaaaagtggatccccgcctgtcacttccgcacgcttcgttcctgagctgcgggtttaccactggcttcggttcgacgtggcgagaagtcaatgtgaagaaagggtctaccgtagccgtcatcggcctaggcgctgtcggtctgggcgctgtcaagggcgctcagattcaaggcgcagccaagattattggcattgatattaacgagttaaaacaagagaaggccaaggctttcggcattacggagttcattaatcccaagctctctgaccggtctgtgtcggagctgatcaaagaggccactggcggactcggggttgattattgcatcgagtgcacaggcgttccagctctgcttaacgaggcgattgaaggaagcaaagtcggtctcgggactgtggtactaatcggagcaggactagagaagtccgtcgagctcaattacattcccctgctgtgtggccgcacggtccgaggctccatctacggcggcgttagagctcagagtgatctccccaagatcgtggagaaatgcgtaaacaaggagattgacctggaccacttgatcactcatgaggtctcgctggccgagattaacaaggctttcgagtacatgaagcatcccgactgcgtgaaagtcgttatcaaattc

SEQ ID NO: 1135 - DNA, 1131 bp, Capsicum annuum
atggagtcgtccaaccctaaagtgattacctgtaaggctgctgtcgcctggaaagagggcgagtctcttaagatggaggagattcaggtggatccacccaagtctagcgagattcggattaagatgttgttcgcgtccctctgccacacggatatattgtgtagcaacggcttccccgtccccctgtttccaagagtcctgggacacgagggtgtcggcatgattgaatcggtcggcgagaacgtcaccaagctgaaggaaggcgacatcgtgatgacactgtatctgggtgagtgtaacgagtgcccgaactgcaaatctggccgatccaacttgtgccataagtaccccatgcgattgagtggactcatgctggacggtacatcccggatgagcattcgaggagggcagatcctctatcatggtttgtcttgtagtacttggtcggagtacgccgtcatcaatgcgaattacgccgtaaaagttgacccccagcaggtcccccttccccacacctcgctgctatgctgcggatttaccactggatatggtgccgcttggagagaggtgtgtatcgagaagggttctactgtagcagtccttggcctgggggccgtcggacttggtgttgtggaaggggcacgatcgcaaggcgccggaaagatcatcggtgtggatattaataacttacgaagaggaaagggagaagcattcggcacgacagattttatcaatcccaaggaacacgaggcttctatcagtgatatgatcaagggaattaccggcggtcttggagttgattacgtattcgagtgtacaggcattccaagcatgttgaacgaagctattgaggcttccaagatgggtatcggcaccatcgtagtgatcggcgcgggcaatggaacatcacgagagttcaacctcataccccttatgtgcggccgcaccatgaagggcagcatttacggcggcatgcgcattcactctgaccttccagctctgctccaccgatgcgcgaacaaagaaatccagctggacgaactcatcacccaccaggtcagctttacagaaattaaccagctgttcgaattgctgaaggacccgcattgcctcaaaataatcatcaagttc

SEQ ID NO: 1136 - DNA, 1125 bp, Camptotheca acuminata
atgtccaagactagcagccaggtgataacctgtaaggcagcagtgtcttggggagcgggcctgcccctaaaagtcgaagaaattcaggttgagccccccaagtcatccgaggtccgactgaagatgttgtgcgcttctctgtgtcacacagatatcctttgctgcaacggactgcccgtaccactgttccctcgggtccccggccacgagggtgtgggcatggtcgagtctgtcggagaaggtatcaccggcctcaaggagggtgacatcgtgatgcccacctatattggtgagtgcgggaagtgcgagaactgtatgtccggcaagtccaacctgtgtttggcttaccccctgccgttttccggattgatgcctgatggaaccagccgaatgtcgattaatggacagaaattgtaccactttttttcctgctctacctggtccgaatatatcgtgatcgactccaattatgtcgtcaaactggacccccgtatctcccacagtcacgcttccttcattagttgtggcttttcaacaggcttcggcgctacctggaaggaggtcaacgtggagaagggctcttcggttgccgttttcggacttggcgccgtcggtctgggagtcgtcgagggagctcgcatgcagggcgctagtaagatcatcggcgtcgacatcaatgagaaaaaaagagtgaagggtcaggtgtttggcctgaccgattttattaatcccagcggatctgataagagcatatctgacctcattaaggacttgactggcggaactggagttgactactgttttgagtgcaccggagtcgccacccttgttaacgaggccctcgaggccacaaaggtgggaattggaacgtcggtcctgatcggcgccggcctgcagcagagcggtatgattaacttcgtccccctcctgtgtggacgcacactcaagggctccatttatggtggagtgaaaattcagtcggaccttcccattattttcgagaagtgtatcaacaaggaaatcaatctggacgagctcctaacccacgaggtgtctcttgacgaaattaacaaggcattccagttgctgaagcagcctgattgcgtgaaagttctcattaaaatt

SEQ ID NO: 1137 - DNA, 1152 bp, Solanum tuberosum
atgtcgccttccaagctcacgatggagtcctctaatcggaaggtgatcacgtgcaaggccgctgtcgtctggaaggagggtgaaatgattaaaatcgaggatattcaggtggatccaccaaagagcaacgaggttcgaattaaaatgctcttcgcctctctgtgccacaccgacatcttgacaacgaacggctttccttacccgcttttccccagagtactgggccacgaaggcgtgggaatgatcgagtctgtcggagagaacgtaaccaacctcaaggagggggacatcgtgatgcctctctatttgggtgagtgtaaggaatgcccaaactgcaagtctggaaagagtaacctgtgtcataagtaccaccttacattctctggccttatgttggacgatacttctcgaatgtctattcacggaggtcaagtgttgtaccactcgttctcttgctctacgtggtccgagtataccgttattaacgctaactacgtcataaaagtcgatcccaagaaaatccccctgcagcacgcctcccttctgtgttgtggatttacaaccggctatggcgcaacctggcgggaggtccacgtagagaagggttctacagtggcagtgctcggcctcggagtggttggattgggagctatcgaaggagcgagatcccagggagctagcaagatcatcggagtcgacatcaacgaatcgaaacgaggtaagggtgagctcttcggtatgactgacttcatcaaccccaaagagtctcgaacctctgttagtgagatgattaaggacgtgaccgagggtctgggcgtcgactacgttttcgaatgtaccggaatcccttctatgctaaacgaggcgatcgaggcatccaagcttggtatcggaaccatcgttgtcattggcgcgggacacggcctgacacgtgagttcaacctggtgccactcctttgcggacgaacccttaagggatccatttacggaggtatccgcctccattctgatctacccgctattctacaccgttgcgcgacgaaggaaattcagcttaacgatctcattacgcaccagatctcactgaccgagattaaccagtcttttgagctcctcaaggatccccactgtgtcaagatcatcattaagttt

SEQ ID NO: 1138 - DNA, 1131 bp, Sesamum indicum
atgaccgacggaaccactacgccccccgtgatcacttgcaaggccgcggttctgcgaaagtccggtgaaccactccaggtggaggagatccaagttgacccgccaaagtctacagaggtgcgaattaagatgctttgtgcttccatgtgccatacagacattctctgttgcaacggtctaccggttcccctgtttcccagaattcccggacatgagggtgttggtgtcgtcgagtcggtgggtgaccaggtgacccacgtcaaggtcggcgacactgtaatgccactgtatctgggtgagtgcggtgagtgccttaactgttcctctgggcgcactaacctctgtcataagtaccccctgggatttagcggcctgatggctgacggcacttcccgtatgagcgtgggcggagaaaagatctatcatcacttctcgtgctctacttggtcggagtatgtggtgattgaggccaactacgctgtaaaagttgaccctagagttagtctgcctcacgcttcttttctgtgctgtggtttcacaacaggattcggatccacttggagagaggttaacattgagaagggttcaacagtcgccgtgatcggactgggagctgtgggcctaggtgccgtcaagggtgctcagatgctcggtgcttctaaggttattggaatagacattaacgagctaaagcatgagaaggcgaaggctttcggtattacagagtttatcaaccccaaactgagtgacaaatctgtctccgagctcatcaaggaagccaccggaggactgggtgtggactactgtttcgagtgcaccggagtgccggccctgctgaacgaggcgattgagggctctaaagttggtctcggaaccattgtcttcatcggtgctggtctcgagaagtccggtgagttgaattacattcctcttctctgtggacgcaccgtgcgaggcagcatctatggcggtgtgagaacccagagcgaccttccgaagatcgttgagaagtgtgtgaacaaggaaatcgacctggatcagctcattacccacgaagtaagccttgctgagatcaataagggcttcgagtacatgaagcagcccgattccttgaaggtcgttatcaagttt

SEQ ID NO: 1139 - DNA, 1125 bp, Swertia japonica
atgactatctcatcgcctgctgttgtcacctgcaaggccgccgtgatttggaaatcaggtgagcccgcaaaagtcgaggaaattcaggttgatccccctaaggcgggggagatacgtgtgaagatgctctacgcttccctttgccacacagacgttctatgttgtaatgggctccctgtacccctattccccagaatacccggccacgagggtgtcggcaccgtcgagagcatcggtgagaacgtgaccaatgttaaggaaggtgacatcgtgatgcctctgtacctgggagagtgtggagaatgccttaactgtaagagcggtcgatctaacctgtgccataagtacccccttggtttttcgggactgctgctcgacggaactagccgtatgtctatcaagggcgagaccgtctaccaccacttctcatgttcaacctggtctgagtacattgtcattgaagctgcctacgcgttcaaggttgatcccaagatgtctctcccccacgcctcctttctgtgctgcggctttacgaccgggtttggagccgcttggcgagaggtatgtgttgaaaagggctcgactgtcgcggtcttgggcctgggcgcggtgggtctaggtgtcgtcgaggccgcacgagtgcaaggcgccagtcgtatcattggtctcgacatcaacgacaagaaacgtgagaagggcgaggccttcggaatcactgagttcatcaaccctaccggctcagaaaaatcggtgtctcagctcatcctggaggccaccgggggattgggggttgactactgctacgagtgtacaggtgtgcctgctctcctcaacgagtcgattgaggcatctaaggtcggactgggtaccgcagtgctcatcggtgcgggctttgagacgtctggtgtgataaattttatccccctgttgtgtggacgaactctgaagggctcgatttacggtggtatccggccgaactcggacctgccggctatagtggataagtgtatttccaaggaaattaacctggatgaactgctcacccacgaggtctcgttgtctgagattaacaaggccttcgagtacctgaaggatcccgactgtgttaaggtcgtaatcaagttc

SEQ ID NO: 1140 - DNA, 1125 bp, Ophiorrhiza pumila
atgaccaagcgatctccttctgtgattacctgtaaggccgctgtgatctggaaatccggagaggcggccaaggtggaggagattcaggtcgagccacctaagtcttctgaggttcgcattaagatgctgtgcgccagcttgtgtcataccgacattctctgttgtaacgggttgcccgtccccctttttcccagaattcccggacacgagggggtcggaatggtggaaagcgttggcgagaacgtcaccaatctgaaggagggagacatagtcatgcctctgtaccttggtgaatgtggagagtgtcttaactgccaatctggaaagaccaacctgtgccataagtacccgctcggattctccggtctgctcctggatggaacttcccggatgtccatcggtggccagaccgtctaccaccacttctcctgctcgacttggtcggagtacattgtgatcgaggctccatatgcggtgaagatcgacccgcgactgtctctgcctcacgcctcgttcctgtgttgtggatttactaccggattcggcgccacatggagagaggtcaacgtcgtgaagggcagtaccgttgctgtactcggattgggcgctgttggcctcggagtggtggaaggcgccagaatgcagggtgcaagtcgaatcattggcatcgacattaacgacatgaaacgagagaagggcgaagccttcggcatgaccgagttcattaaccctaaacattccgagaaatctatttccgagcttatcaaggacgtgactggaggtttgggtgtagattactgctacgagtgtactggtgtccctgccctccttaacgaagccatcgacgcctccaaggtgggcctgggcaccgccgtcctaatcggggcaggactcgagacctcgggacagattaactacattccgctgctgtgtggacgagtgcttaagggatcaatctatggtggcgtccgaccactctccgacctgccgaccatcatcgacaagtgtatcaataaggagatccccctcgatgagctgatgactcatgaagtctctctagacgagatcaataagggttttgaatacctgaagcagcccgattgtgtcaaggttgtcattaagttc

SEQ ID NO: 1141 - DNA, 1125 bp, Cinchona ledgeriana
atgaccaaatcttcgcagggagtcatcacatgtaaggctgccgttatctggaagtccggggagccccctaaagtcgaggagatccaagtcgatccgcccaaggcttccgaagttagaatcaagatgctgtgtgccagtctgtgccacactgacatcctctgctgcaatggcctccccgtaccactgttcccccgcatcccgggccacgagggcgtagggatggtagagagcgtcggcgagaacgttaccaacctgaaagagggcgacatcgtgatgcccctatacctgggcgagtgtggtgagtgcctgaactgcaagtctggccgatccaatctgtgtcacaagtaccccctcggattttctggcctcctgcttgatggcacctctcggatgtccactggtgggcagaccatttaccaccacttctcgtgcagcacctggtccgagtacattgtgattgaggccgcctatgctgcgaaagtggacccccgtatctcgttccctcacgcttcttttctgtgctgcggctttactacgggattcggcgcaacttggcgagaggtcaccgtcgagaagggatctaccgtagcggttctgggcctcggagccgttggcctgggcgccgtggccggcgccagaactcagggtgccacgcgaattattggggtcgatattaacgacatgaagcgagagaagggtgaggccttcggtattactgagttcatcaaccccaaggactccgacaagtcgatcagcgagcttattaaggatgcaactgggggcctgggcgtcgattactgttacgagtgtactggcgttcccgccctgttgaacgaggcaatcgatgcctccaaggtgggcctcggaaccattgtgcttatcggcgctggcctaaagaccagcggagagatcaattatatccctcttctctgcgggcgaaccctcaaaggcagtatctatggcggggttcgaccacagtcggatttgccctcgattgttgataagtgtattaacaaggagattcaactcgacgagctgatcacccacgaggtctctctccacgagattaatcgaggctttgagtatctcaagcagcctgactgcgttaaagtcgtcattaagttt

SEQ ID NO: 1142 - DNA, 1134 bp, Lonicera japonica
atgactaaatcttctagtgaggttatcacgtgcaaggccgctgtgatctggaaatcgggcgagcccgccaaagtcgaggagattaaggtggaccccccaaagtcgtctgaggtgcgtattaagatgctgtgtgcctcactgtgtcacaccgacatcttatgttgcaacggactccccgtccctttgttcccacggatcccgggtcacgaaggcgttggtatggttgagtcagttggcgagaaggttacggacgttaaggaaggggatatcgttatgccgttgtacctgggagagtgcggtgagtgtcttaactgtaagtctgagaagacaaatttgtgccacaagtatcccctggatttcagtggcgtgctgccctcagacggtacctctcgaatgtccattgctaagtcgggcgaaaaaatttttcatcatttttcttgtagcacttggtcagagtacgtcgtaatcgagagcagctacgttgttaaggtcgacccccgtctcccgcttgcccatgccagttttctggcgtgtggattcaccaccggatttggagccgcatggcgagaggccaacgtgcataaaggctcgactgtggccgtccttggactgggtgcagtggggttgggagtggtatctggagccaaggttcagggcgcctctaaaattattgctgtcgacattaacgatatgaagcgagagaagggcgaatcattcggtatgaccgacttccttaaccccaaggagagtggtaagagcgctagcgaactcattaaggaggccacgggcggtcttggtgtggattactgtttcgaatgcactggagttcccgccatgcttaatgaggctattgacgcttccaaggtcggcttgggtaccatcgtcctgatcggtgcgggaatggagacgtctggcgtgattaactatatccctctcctctgtggccgcaccctgaagggatccatctatggaggtgtccgaattcagtccgacctgccagtgatcattgagaaatgtatcaacaaggagattcagctcgacgaattgcagacgcatgaggtgtctctggaagagatcaacgaggcctttggattgcttaaacaccctgattgtgttaaggttgtcattaagttt

SEQ ID NO: 1143 - DNA, 1125 bp, Coffea canephora
atgaccaagtcgacgccctctgtagtgacctgcaaggccgctgtcgtgtggaagagcggcgaaccgcctaagattgaggagatccaggtcgaccccccaaaggcttcggaggtccgagtcaagatgctgctcgcctctctctgccacaccgacatcctctgctgccacggcctccccgtacccctctttccccggattcctggccacgagggtgtcggcatggtggagtctgttggagagaacgtcaccaacctgaaggagggtgacatcgtgatgcccctgtaccttgcagagtgcggcgagtgcctcaactgcatttcgggtaagaccaacctgtgccacaagtacccattgggattctctggcctgctccttgacggcacttcccgaatgtcgattagaggccaggctatttatcaccacttctcctgctccacgtggtccgaatatatcgttatcgaggccccctatgctgtgaaggtcgacccccgagtgagcctcccgcatgcctcctttctctgctgcggattcacgactggattcggtgcggcctggcgagaaatcacagtggagaagggaagtacagtcgcagtcctcggtctgggagctgtcggcctgggcgttgccggcggagcccgaatgcagggtgccagtaggattatcggcgtcgatcgaaatgagatgaagagagagaagggagaagcgttcggaatgacggaattcatcaaccccaagggctcggacaagtcgattagtgatctcataaaggaggtcaccggtggcctcggagttgactactgttttgagtgtactggagtgccagacctccttaatgaggccatcgaggcttctaagattggccttggaacatccgtcttgatcggcgccggcttcgagacctcaggagattttaagtacatcccactgatttgtggacgaaccctgaagggatctatctacggaggagttcgtccaaagtccgacctgccgctgctcctggaaaagtgtgcgaacaaggagatccctctagacgagctcatcacacacgaggtcacccttgacgagattaacagaggcttcgagtacctcaagcaccctgactgtgtgaaggttgtggttaagttt

SEQ ID NO: 1144 - DNA, 1125 bp, Rauvolfia serpentina
atgaccaagagcacacctactgttattacctgtaaagcggctgtcctgtggaaagcgggcgagcccccgaagatcgccgaaattcaagttgatccacccaaggcacctgaggtgcgagttaagatgctttgcgcatcgctctgccacaccgactttctgtgttgtaacggactcccagtgcccctgttcccacggatccctggacacgaaggagttggaatgatcgagagtgttggcgagaacgtgcgtgaccttaaggagggtgacattgtgatgcctctgtacctgggcgagtgcggagaatgtctgaattgcaagtcaggccgaagcaatctgtgccataagtatccccttggtttttccggtctcctcctggatggcacttcccgtatgtcaatcggaggacaaaaggtttaccaccatttctcctgtagtacttggtccgagtacatcgtgaccgaggccgcctacgcagtgaaggtggaccctcgagtatcgctaccgcacgcttcgtttctgtgttgtggatttaccactggattcggagccacttggagggagatcaacgtcgagaagggttcaactgtggctgtgctcggcctgggtgccgtgggcctcggcgccgtgcagggcgcccgttctcagggcgcttcccgaatcatcggagtagacattaacgacaagaagaggaagaagggtgaagcgttcggaattactgagttcatcaaccccaagggctctaacaagtcagtatcgcagcttatcaaggacgcgactggcggactgggcgtggattacgtctacgagtgcactggcgttcctgctctgctgaacgaggccatcgaagcttctaaggtgggacttggaacctccgtcctcattggcgccggcctggaaacttccggcgagatcaagttcattcctctgctgtgcggaaggactgttaaggggtcgatctacggcggggttagaccgaagtccgacctgcccaccattattgataagtgcatcaataaggagattcccatggacgagctgcttacacatgaggtctcgctgtcagagatcaacaaagctttcgagtacttgaagcagccagattgcgtgaaagtagtgatcaaattc

SEQ ID NO: 1145 - DNA, 1128 bp, Gentiana rigescens
atgaccaaaactatcacccctgccgtaatcacttgtaaggccgccgtcatctggaagagtggagagcccgccaaggttgaggaaatccaggtagaaccacccaaaaccggtgaggtgcgggttcaaatgttgtacgcctccctttgtcatactgacgtcctatgttgcaacggtctgcctgtccccctttttcctcgaatccctggacacgagggagtgggagtggttgaatctgtcggcgaaaacgtgaccaacctcaaggagggcgatatcgttatgcctctttacctcggtgaatgtggagaatgcctcaactgcaagtctggaaagtccaacctttgtcacaagtacccgctgggtttttcgggcttactgctcgacggtacctctcgaatgtctattaagggtcagaccgtttaccatcacttttcatgcagtacatggtcggagtacatcgtcattgaggctgcctacgcctttaaagtggaccccaagatctccctcccacacgcatcttttttgtgctgcggattcaccaccggctttggcgcagcttggcgtgaggtcgtcattgagaagggatcgactgtcgctgtcttgggacttggcgccgtcgggctcggtgtcgtggaggcagctcgaatccagggagcctcccgtattatcggcctcgatattaacgacaagaaacgggaaaagggggaggccttcggtctgaccgaattcattaatccaagcggctcagacaagtcagtgtcccaacttatcaacggagttaccggaggactaggtgtggattactgctacgagtgtaccggcgtgccagctctactcaacgaagctattgagtcatccaaagttggcctgggcactgtagtcctgatcggtgctggattcgagacctccggtaccataaacttcatccctctcctgtgtggacgaacggttaagggttcgatctacggaggtgtgcggccgaactcggacctgcctgcgattattgccaagtgtgtcaacaaggagattaacctcgacgagctactaacgcatgaagtcgctctttctgacattaacaagggcttcgagtacctacatgaccccgactgtgttaaagttgtcataaagttt

SEQ ID NO: 1146 - DNA, 1134 bp, Catharanthus roseus
atgaccaaaaccaacagccctgctccttccgttatcacgtgtaaagcagctgtggtgtggaaatccggtgagcctcccaaggtcgaagagatccaggtggaccctcccaaggcttcggaggtccggatcaagatgctgtgtgcttccctgtgtcacactgacttcttggcttgcaacggtcttcctgtgcctctgttcccacgaattcccggccacgaaggggtgggcatgattgagtctgtgggagagaacgtcactaatctcaaggagggagatatcgtcatgcccctttatcttggtgagtgcggagagtgcctgaattgtaagtcaggccgaaccaatctctgccataagtaccctctggggttctcaggcctgttgctcgacggcacctcaagaatgtccatcggggagcagaaggtgtatcatcacttttcctgttccacatggtcggagtacattgttatcgaggccgcttacgccgtgaaggtggatccacgcgtttctctgccccatgcttcgttcctttgttgcggatttaccaccggattcggagcgacatggcgagacgtgaacgtggttaaggggagtacagttgctgtgctgggtctgggcgcagttggactgggagccgttcagggcgctaaatcccagggagcctcgcgaatcatcggccttgacattaatgacaagaagcgagagaagggagaggccttcggtatgactgaattcatcaacccgaagggttcgaacaagtctatttccgagctcatcaatgaggccaccggcggattgggactcgactacgtgtacgagtgtacgggagtgcctgccctgctcaacgaggctatcgagtcgtccaaggtaggcctcgggacagccgtgctgatcggtgccggtcttgaaacgtccggggagattaaattcatccccctgctttgcggacggaccgttaagggttccatttatggcggagtgcgacctaagtcggatttgcccactctcatcgaaaagtgcatcaacaaggagatccctatggacgagcttatgacacacgaggtgagcttgtccgaaattaacaagggatttgagtacctgaaacaccccgattgtgtgaaggtggtgatcaaattt

SEQ ID NO: 1147 - DNA, 1125 bp, Olea europaea
atgactaaccggaacccagaagtcatcaagtgcaaggctgcagtcgtgtggaaggccggggagccgctgaaggtggaagagatccaggtggacccccctaaatcttcggaagttcgaatcaagatgctctgcgcatctctctgccacacggactttctgtgctgcaacgggcaccccgtccccctcttcccccgaatccctggacatgagggcgtaggcatgattgagtctgtaggcgggggcgttactaacctgaaggaaggagaccgagttatgcctctgtacctgggagagtgtggagaatgccttaactgcaagtctggaaaaaccaacctatgtcacaaatatccatttaactttacaggtcttatgccggacggcacctctcggatgcatattggcgaccaaatcatctaccaccatttctcctgtggcacctggtccgagtacgtggtcatcgacgctaactttgccgtcaaggtcgacccccgggttcctctggcgcacgcaagctttctctgttgcggattcaccaccggattcgggtctgcatggcgagccgttactatcgagaagggctctactgtagctgttatcggcgtgggcgccgttggactgggtgtgatggaggccgctcgaatgcaaggtgcttcacgaattattggaatcgacaagaacaactttaagaaaaagaagggcgaggcctttggaatgactgaatttatcaaccctaaggaatccgacaagccagtgtccgagcttattaaggacgcaacaaacggacttggtgtcgattacttctacgagtgtacaggcgtgcctgcacttctcaacgaggctatagagggctcgaaggtgggtctaggcacgattgtcttgattggatctggtctcgacctgtcaggagaactcaagtacatcccgcttctttgtggtcggaccctgaagggcagcacgtacggaggtgttagaccccagagcgacctcccaattattgtcgagaagtgtattaacaaagagattcagctggacgagctcgaaacccacgaagtttctcttgaggaaatcaacaaagcctgggagtacttaaagcaacccaactgcgtcaagattgtgatcaactac

SEQ ID NO: 1148 - DNA, 1134 bp, Sesamum indicum
atgacaaacactaacaccacccctgccgttatcacttgcaaggccgccgtgattcgtaagtcctgggaaccacttcaggttgaagagatccaagtggatccgccaaagtcaggcgaggttcgaattaagatgctgtgcgcctcaatgtgccataccgacatgacctgctgtaactcgggatttcccgtacccttctttccccgcatcccgggccatgaaggcgtgggagtcgtggaatccgtcggcgaacaggtgaccaacctgaaagtgggagatatcgtcatgactctgtatctcggcgagtgcggcgaatgtctcaactgttcttctggacgaaccaacctttgccacaagtaccccctaggcttcgatggattgatgcccgatggaacttctcgactatctgtcggtggggagcgaacttaccacctggtcagctgttctacctggtcagaatatgctgtcatcgacgccaactacaccgtcaaggtggacccacgtctgagtccacctcacgccagcttcctgtgctgcgggttcaccaccggattcggatcttcttggcgggaggtgaatatagagaagggatccacggtggctgtgattgggcttggtgccgttggattgggtgccgccaagggtgcgcagttgcaaggagcatcgaagatcatcggaatcgacattaacgagcttaagaaggaaaaggccaaggccttcggaatcactgattttattaatccaaaactctcagacaaaagcgtgagtgagctcatcaaagaagctaccggcggactcggagtcgattactgtttcgaatgttctggcgttcccgctctcgtgaacgaggcaatcgaaggatcaaagatgggcctgggtacgattatggtcttaggcgtaggccctggcaagtccgtggaggtcgattacatcccactgctctgcggccgaaccctgcgaggctcaacttacggcggcgtcagaacccagtccgacttgccgaaaatcatcgagaaatgcgtgaacaaggagattgacttagaccagctgattactcacgaagtgtctctcgccgagatcaataagggccttgagtacatgaaacagccaaattgtgtgaaggttgttattaaattc

SEQ ID NO: 1149 - DNA, 1125 bp, Olea europaea
atgactcgaggaaaccccggtgtgatcacgtgcaaggcagccgttgtgtggaagtccggtgatcctttgaagattgaggagatccaagttgatccgcctaagacctcagaagtgcgaatcaagatgctgtgtgccagcctttgtcacaccgacttcctctgcaggaacggcctgcccgtccccctcttccctcgcattcccggtcatgaaggtgtggggatgattgagtcggtcggagaggggatcacgaaccttaaggagggagacgtggtcatgcccctgtacctcggtgagtgcggtgagtgcctgaactgcaaatccggcaagactaacctctgccacaagtacccccttaactttactggtctgatgccggatggaacttctcgaatgcatattggggaccagattatttatcaccacttctcttgtggcacgtggtctgaatacgtcgttatcgatgccaactttgctgtgaaagtggatcctagagtttctctagctcacgcctcgttcctatgctgcggtttcactaccggattcggaagtgcctggcgagaggttaccatcgaaaagggctccactgtcgccgtgatcggagtcggtgcagtgggactgggtgtcatcgaggctgcccgtatgaacggggcttctaggatcatcggtattgacatcaataacttgaagaaaaaaaaaggcgaggtttttggcatgacagagtttatcaatcccaaggagtccgataagcccgtttctgagttgattaaagaaaccactgggggacttggtgttgattattgttacgaatgtactggcgttgctgagctgctgaacgaagccatcgaaggctctaaggtcggcctcggtaccattgtgttcattggagcgggccttcacctgtccggcgaactcaagtatattcccctcctctgcggtcgaactattaagggatcgatttacggcggcgtgcgcccgcagactgacctgcccaaaattgttgaaaagtgcattaacaaggagattcaactggacgaactgcttacgcacgaggtgagtctggaggaaatcaataaagcttgggagtatctgaagcagccctcgtgtgttaaggttgttattaagtac

SEQ ID NO: 1150 - DNA, 1152 bp, Erythranthe guttata
atgacctcacggggcgttatgacctgtcgggccgcagtcgtccggaagtgcagagaagccctggaggtggaggaaatcgaggtagatccacccaagtcctctgaagtgcgaattaaaatgttgtgcgcctcaatctgtcacaccgatatcttgtgctggcagggcgtcccacttgttctgtctaccatgaacacgcttataacttcaccgatgttcccccgaattcccggacacgagggagtgggtgtgattgagtccgtgggagagaacgtaaccaacctgaaggtcggggacaccgtcatgcccttgtaccttggcgagtgtggcgagtgctctaactgcatttcgggtattaccaacctgtgtcataagtaccctttcaacttcaacggcctgatggccgatggtacaagccgcatgtcggttaagggcgagcggctttaccaccacttctcgtgctcgacgtggtcggagtacgccgtgattgatgcaaactacgcggtcaaggttgatcctcgaatctcccttcctcacgcttctttcctatgctgcggcttcaccactggctttggatccaccagccgcgtggtcaatattcacaagggctcgaccgtggctgtgattggtctgggtgccgtcggactcggagccgtgaagggagctcagatgcttggcgcttctaagatcattggcatcgacattaacgagaagaaacacgacaaggcgcgatttttcggaataaccgagttcattaacccggaggtgtctggaaagagcgttagcgagctgattaaggaggcgactggcgagctgggcgtagattactgtttcgagtgcaccggcgttccagctctcctgaacgaagccattgagggctcgaaggtgggcaccggaaccgttgtctttattggagccggtgtcgagaagtctggagaacttaactacatccctctgctgtgcggtcgaactgtgaagggatctatttacggaggcgtgcgtacacacaccgacttaccttccattgtggacaagtgtgtgaataaggagattgacctggaccagctcattacccacgagatttccctggctgagatcaacaaaggcttccaatacatgaaggatcctaactgtatcaaagtagtgatcaaattt

SEQ ID NO: 1151 - DNA, 1080 bp, Catharanthus roseus
atggcaaaatcaccagaagtggaacatccagtcaaagcgtttggttgggcagccagagatacgagtggtcatttaagtccatttcatttttctagaagagccacaggtgagcacgatgttcaatttaaggttttatactgtggaatctgccattccgaccttcacatgattaagaatgaatggggattcaccaaatacccaatagttcctggtcatgaaatcgtcggtatcgtaactgaagtaggctcaaaagttgaaaaatttaaagtaggtgataaagtgggagtaggctgtttggtgggatcatgtcgtaaatgtgatatgtgcacaaaggatttagaaaactattgccctggacagatactgacttatagtgctacgtatacagatggtaccactacgtatggtgggtactctgacttgatggttgcagacgagcattttgtgataagatggccagagaatcttccaatggatatcggagccccgctattgtgtgctggtattaccacttactcacctcttcgatatttcggattagataaacctggtactcatgtgggtgttgtgggcttaggtggcctgggacacgttgctgttaaatttgctaaagccttcggtgcaaaagttacagtgatcagcacttcggaatctaagaaacaggaagcattggagaaattaggagcagattcttttttggtttccagggatccagaacagatgaaagcagctgctgcgtctttggacggaataatagataccgtttctgctattcacccaatcatgccgctattgtccatccttaaatctcatgggaaattaattcttgttggtgcgcctgaaaagcctttggaattaccctcctttcctctgattgctgggaggaagattatcgctggttcagcaattggtggattgaaggagacacaagaaatgatcgattttgcagctaagcataacgtgttaccggatgtggagctagtttctatggattacgtgaacacggcaatggaaagattattgaaggctgacgtaaagtatcgttttgtcatagatgtcgcaaataccttgaaaagtgca

SEQ ID NO: 1152 - DNA, 1128 bp, Ocimum basilicum
atggcaaacaacactaacgctggcgtcataacctgcaaggcggctgccgcttggaagccctcggaaccgttagtagttgaagaaatttgcgtggaacccccaaaatccactgaagtgaggattaaaatgttagctgcgagtatgtgtcatacggacatactattatggaagggtttctttcctctttacccacgtattccgggtcacgagggtgctggtgtgattgaaagcgttggtgaaaaggttgctaacctgaaagttggagacacagttatgcccctgtcaatcggtcaatgcggtgaatgttctaactgtgcaactggtaagaccaatatctgttttaaatatccatttggtatctctggtttgatgcccgatgggacatcaaggatgagcgctaagggccaaaaactgtatcatatgtttacgtgcagcacttggtcggaatacactgtcgttgacagcaatttcgtggttaaagtagaccctaggatcccattacctcacgcctcactgttaacctgcggttttttaacaggatacggtgctccttggcgcgaatcacgtgtagaaaagggcagtacagttgccgtgattggtttgggggctgtaggtttaggagcagtttcagcatctagaatattaggtgctagtaagattatcggtatagatgttaacgaactcaagagggagaaagcaactgtgtttggtgtaacggaatttatcaacccaaagcactctgacaagacagtgtctcaactaattcaagaagcaacgggtggtctgggtgttgattgttgtattgaatgtacgggtgtttcgagccttttgaacgaagctatcgcttccacaaaagtagggatcggtgaggtagtactgattggggctggcgaaaaagaaaaggttgagatctcttacattccacttatgctcggtaggtctgttaaaggaactacactgggtggtgtaaggatccacagcgatttacccaaaatagtggaaaaatgcataaacaaagaaatcgatctggatgaattaatcacgcatgaagtgtctttggtagatgtgaataaagggtttatggaatatatgaaccaacctgactgtgtcaaagtgtcggtcaaattc

SEQ ID NO: 1153 - DNA, 1125 bp, Camptotheca acuminata
atgtcaaagacatcatcacaggttatcacgtgcaaagctgctgttagttggggtgctggattaccattgaaagttgaagaaattcaagtcgaacctccgaaaagttccgaagtcagattgaaaatgttgtgcgccagtctctgtcacactgatattctttgctgtaacggtttgcctgtcccgttgtttccgagagttcccggtcacgagggcgttggtatggttgagagtgtgggtgaggggattacgggcttaaaagaaggtgatattgtcatgccaacttatattggtgagtgtggtaagtgtgaaaattgtatgagtggtaagtctaacctttgtcttgcttacccattgccattttcaggtctaatgcccgatggtacatctaggatgagtataaatgggcaaaagctatatcatttcttctcttgttcaacttggtctgaatacattgttatagattctaattatgtcgtgaaattggaccccagaatttcccatagccatgcctcattcatttcatgtgggttctctactggtttcggtgctacatggaaagaggttaatgtagaaaaaggctctagtgtcgctgtttttggtctaggggctgttggcttgggtgttgtcgaaggagctagaatgcaaggtgcctcaaaaatcattggagttgacataaatgaaaaaaaaagagtcaaaggacaagtctttgggctcaccgatttcattaatccctctggttcagacaagagtatcagcgacctaataaaagacttaacaggtggaactggcgtcgactattgcttcgagtgtactggagtcgccactctcgtaaacgaagctcttgaagctaccaaggttgggataggtacctctgttcttatcggcgctgggttacaacagtcaggtatgattaatttcgtacctcttttgtgtggtagaacactcaaaggatcaatatacggtggtgttaagatccaatctgatctacctattatttttgagaaatgcataaataaggaaattaatctcgacgaattgttaacgcatgaagtgtctttagacgagataaataaagcctttcaactacttaaacagcctgattgtgttaaagtgcttatcaagatc

SEQ ID NO: 1154 - DNA, 1125 bp, Swertia japonica
atgacaattagttcccccgctgttgtcacatgtaaagcagcagtgatctggaagtcaggtgaacctgcaaaagtcgaagaaattcaagttgatccaccaaaagctggggagatcagggttaaaatgttgtacgcatccttgtgtcatactgatgttttatgttgtaatgggctcccggttccattgtttcccagaatacccggccatgaaggagtcggtactgtcgaatcgataggtgagaacgttactaacgttaaggaaggtgatatcgttatgccgctgtaccttggagagtgtggtgaatgtcttaattgtaaatcgggtaggtctaacctgtgtcacaagtatccattgggattttctggtttactgctggacggcacatcgagaatgagtataaaaggtgaaaccgtttatcatcatttttcatgtagcacctggtcagagtacatcgtgatagaggcggcatacgcctttaaagttgatcctaaaatgtcattaccccacgccagctttttgtgttgtggtttcaccacgggatttggcgcagcttggagagaggtgtgtgtcgaaaaaggatccactgtagctgtcttaggactaggggcagttggtttgggcgttgtggaagcagctcgagtccaaggcgcttctagaattattgggttggatattaatgacaaaaagagggaaaagggagaggcttttggtatcactgaatttattaatccaacaggctctgagaaaagtgtgagccaattaattctggaggctactggagggttgggcgtagattactgctacgaatgtacaggcgttcctgctctgcttaatgagtctattgaagctagtaaggttggactcggtacggccgttttgattggtgcaggcttcgaaacgtctggtgtcattaatttcattccattattatgcggtagaactctaaagggttcaatttacggcggaataaggccaaactcagatctaccagccatagtggacaaatgtatctcaaaggagatcaacctagatgagctcctaactcatgaagtgagtttaagtgaaataaacaaagcctttgaatacttgaaggacccagattgtgtgaaagttgtcataaagttc

SEQ ID NO: 1155 - DNA, 1125 bp, Cinchona ledgeriana
atgaccaaaagtagccaaggtgtgattacttgtaaggctgcagtcatctggaagtcaggtgaacctcctaaggtagaagaaatccaggttgacccgccaaaagcatcggaagtgagaattaaaatgctatgtgcatccctatgtcataccgatatcttgtgttgtaatggtttaccggttcccctatttcctaggataccaggccacgaaggagttggcatggtcgaaagcgttggcgaaaacgtaacaaatttgaaagaaggcgatatcgtaatgcccctttacttaggcgaatgcggtgagtgcttgaattgtaagagcggtcgttcaaatctctgtcataagtacccattgggtttcagcggattgttattggatggtacgagtagaatgagtactggcggtcaaaccatttatcatcatttctcttgctctacttggtcagaatacattgttattgaggccgcatatgcggcaaaagttgatccaagaatctctttccctcatgcttcattcctgtgttgcggtttcactacaggtttcggtgctacttggagggaggttacggtagaaaaaggaagcacagtcgcggttttgggtttgggagctgttggtcttggtgcggtggcaggtgccaggacccaaggagctaccaggattattggtgttgatattaatgatatgaaaagggaaaaaggagaagcatttgggataactgagttcattaatccaaaagactccgacaaatccataagtgaattaataaaagatgctaccggcggtcttggtgtagactactgctacgaatgcaccggtgttccagcattgctaaatgaagctattgatgctagtaaagtgggtcttggtacaattgttttgattggagctggacttaaaacctcaggcgagatcaattatatacctcttttatgtggtcggaccctaaagggtagcatttatggcggtgtcaggccacaatctgatctacctagtattgtagataagtgtattaacaaagagatacaactagatgaacttataacccatgaagtgtctttgcatgaaattaatcgaggctttgaatatcttaaacaacccgattgtgttaaagttgttattaagttt

SEQ ID NO: 1156 - DNA, 1125 bp, Rauvolfia serpentina
atgaccaaatctactccgaccgtaatcacctgtaaagccgctgttctatggaaggccggtgaaccacccaagatcgctgaaatccaagttgatccaccaaaagcaccagaagttagagtaaaaatgttatgtgcatccctgtgccacaccgactttttgtgttgtaacggtcttcccgttccgttattcccacgaatccctggtcacgaaggggttggtatgattgaatccgttggagaaaacgtcagagatcttaaggagggagatattgttatgccactatacctcggtgaatgtggtgaatgtttgaactgtaagagcggccgttcgaacctatgtcataagtaccctctaggattctctggattacttcttgatggtacttccagaatgagcatcggtggacagaaagtgtatcatcattttagctgctcaacatggagtgaatatatcgtaactgaggctgcatacgcagtaaaagttgaccctagagtttctttgccccacgcatcatttctttgttgtggttttacaacgggctttggcgctacttggagagagattaatgtcgaaaaaggttcgactgtcgcagtcctaggcttaggtgctgtgggattaggtgcagtgcagggtgcgagatcgcaaggagctagcaggattattggtgtggatattaacgataagaaaaggaaaaagggtgaagccttcggcatcacagaattcattaatcctaagggaagtaacaagagtgtttctcaattaatcaaagatgcaactggcggccttggtgtagattacgtctacgaatgtactggtgttccagctctattgaatgaggctatagaagcttccaaagtgggcttgggcacatctgttttgatcggggctggtttggaaacgtcaggtgaaatcaaatttatcccattgttatgtggcagaacagtgaagggctcaatttatggtggcgttagacctaaaagtgatcttccaaccattattgataagtgtataaataaggaaatccctatggatgagctgctaacccatgaagtctcacttagtgaaatcaacaaggctttcgagtatctgaagcaaccagactgtgttaaggtcgtgataaagttc

SEQ ID NO: 1157 - DNA, 1164 bp, Arabidopsis thaliana
atgtcgtggtggtgggctggagccattggagcggcgaagaagaagctcgatgaggatgagccgtctcaatcattcgagtcggtcgcacttatcatcggagttactggcattgttggtaactcgctggctgaaatcttacccctgtccgacacacccggcggaccgtggaaggtatacggtgtggcccgtcgaccccgaccgacatggaacgctgaccaccccattgactacatccagtgcgacgtctctgacgccgaagacacacggtcaaagctctctccgttgaccgatgtgacccacgtgttctacgtgacttggaccaaccgtgaatccgaatcggagaactgtgaggccaacggcagcatgttgaggaacgttctacaggctattatcccgtacgctccgaacctgcgacatgtgtgcctgcagaccggcaccaagcattacctaggaccctttacaaacgtggacggtccgagacatgacccgccgttcacagaggacatgccgcgattgcagattcagaatttctactacacccaggaagacattctgttcgaagagatcaagaagattgagaccgtgacctggtcgatccaccgacctaacatgattttcggcttcagcccctacagcctgatgaatatcgtgggcaccctgtgcgtctacgccgcgatctgcaagcatgagggtagcccgttgctttttcccggatctaagaaggcctgggaaggattcatgacagcttcagacgcagaccttattgcagagcaacaaatttgggccgccgtggacccctatgctaagaacgaggccttcaattgcaacaacgccgacatttttaaatggaaacatctctggaagatcttggccgagcagtttggcatcgaggagtacggattcgaggagggaaagaatctaggcctggttgagatgatgaagggtaaggaacgcgtgtgggaagagatggtgaaggaaaaccaactgcaggagaagaagctcgaagaggtgggagtttggtggttcgccgatgtcatcctgggcgttgagggtatgattgatagcatgaacaagtcgaaagagtacggcttcttgggatttcggaactccaataactccttcattagttggatcgacaagtacaaggctttcaagattgttcct

SEQ ID NO: 1158 - DNA, 1167 bp, Digitalis lanata
atgagttggtggtgggccggtgccatcggagccgctaaaaaacgactggaggaggatgacgcccagccgaagcattcgtcagtagccctcatcgtgggcgttactggcatcattggtaactctctggccgaaatcctgcctctggccgacactcctggaggtccgtggaaggtctacggcgttgcccgacgaacacgaccagcctggcatgaggacaaccctataaactatgttcagtgcgacatctcggaccccgacgactcccaggctaagctttcgcctctgaccgacgtcacgcatgtcttctatgttacatgggcaaaccgatctaccgagcaggagaactgtgaagcaaactccaaaatgttcagaaatgtcctcgacgcagtcattcctaattgtcccaaccttaagcacatctccctccagactggacgaaagcattacatgggccccttcgaatcctacggcaagatcgagtctcacgaccctccatacactgaagatctgccccggctcaagtacatgaacttctactatgatctggaggacataatgctcgaggaggtggagaaaaaggagggcctcacctggtccgtacatcgccctggcaatattttcggattctctccctacagcatgatgaacctcgttggcaccctgtgtgtctacgccgcaatctgtaaacatgagggcaaggtgctgcgatttaccggttgcaaggcggcatgggatggctacagtgactgttctgacgccgacctgattgccgagcatcacatttgggcggccgtggacccttacgccaagaacgaagccttcaacgtgtctaacggcgacgtattcaaatggaagcatttttggaaggttctggctgagcagttcggagtcgggtgcggggagtacgaagagggtgttgacttgaagttgcaggatctgatgaaaggcaaggaacccgtgtgggaggagattgtccgagaaaacggcctgacacctactaaactgaaagatgtcggcatctggtggttcggcgacgttattctgggcaacgagtgctttcttgactcgatgaacaagtccaaggagcacggatttcttgggttccgaaactctaaaaacgctttcatttcctggatcgacaaggctaaagcctacaaaattgtcccg

SEQ ID NO: 1159 - DNA, 1188 bp, Nepeta mussinii
atgtcgctgtcatggtggagagctggagctgctaagaagcgaatggatgatgatgaatcccttcttgtcaagcaacagcagcagcagtgtgtcgccctgatagttggcgtcactggacttgttgggaactctctcgctgaaatgctccccctgcccgacactcctggaggaccctggaaggtatacggtgtcgctcgaagagcccgaccaagttggaacgaggaccagccaatgacatatatttcgtgcgatgttagcaacacgggcgaagtggaagccaagctctcgcctctctccgacgtcacccatattttctacgctacatggactagccgcagtacagaggaggagaactgcgaagctaacggcaagatgctgaagaacgttctggacgccatgatccccaattgccccaacctcaagcacatctgcctccagaccggccgctttcactacgtggcatctgttgtggactggaagattaacggctcccacgacacccccctaactgaggacctgcctaggctcaaaaccaacaacttctattacacccaagaggacatccttctcgaggaggtgaagcggaaggagggtctgacctggtcggtgcatagacccggcactattttcggtttctctccgtactctatgatgaacctggtcggcactttatgtgtgtacgctgcgatctgcaaacaagagggtgctgttctacgttttcccggctgtaagggtgcctgggacggtcactcagactgtgcagacgccgacttgatcgccgagcagcagatctgggctgcactggacccgcatgctaagaaccaggccttcaacgtcagcaacggggacctattcaaatggaagcatctgtggaaggtcttggccgatcaatttggtgtggagtgtggtgactacgaggaaggccagcagctccgcctacaggacgtcatgaaggacaagggacctgtgtgggataaaattgtcgccgagaatggactgtccaacaccaagctggaggacgtcggtaaatggtggttctccgacacaattctgtggaacgagtgccgactagacagtatgaacaaaagcaaagagcacggcttccttggcttccgaaactcgaagaactgcttcctatactggattcacaaggtgaaggcctacaacctcgtcccgtccacctataca

SEQ ID NO: 1160 - DNA, 1191 bp, Nepeta cataria
atgtctatgaactggtggcgtgatggagcggccaagaaacgaatggatgagagctccgcggtgaagctccagcaacaacaatgtgtcgcccttattgtcggtgtcaccggcctcgtgggcaactctctggccgagatgctgcctctttctgatactccgggcggcccttggaaggtatacggggtggcgcgaagaccccggccctcgtggaacgaagaccaccccatcaactacatttcttgcgatgtctcaaacacagccgaggtcgaggctaagttgcctcccttgtccgacgtaactcacatcttctacgctacttggacgtcgcgaagctctgaggaagagaactgtgaggccaacggaaagatgctgaagaacgttctcgacaccatgatccctaattgccctaacttgaaacacatttgtttgcagaccggacgctttcactacgtggcttcagtcgttgactggaaaatcaacggatcccatgacacccctctgacagaagatctcccccgtctgaacaccaacaacttctactacacccaagaggacattcttctagaggaagtcaagcgaaaggaagggctgacttggtctgtccatcggcctggaactatctttggattttccccgtactcaatgatgaacttagtgggcactctttgcgtctacgctgccatctgtaaacaggagggcgccgttttgcgattccccggttgcaagggtgcctgggacggatacagtgactgcgcggatgcagacctgattgcggagcactatatttgggccgcccttgacccacacgcgaagaaccagtctttcaatgtgtccaacggagatgttttcaaatggaagcacctgtggaaggtccttgccgagcagttcggagttgagtgcggtggctacgagtacgaagagggccagcaagtccgactccaagacgtcatgaaggataaggggcccgtgtgggacaagattgtccgagagaatggattgtcgaacacaaagctcgaagatgtcggcaagtggtggttctctgacactattctttggaatgagtgtcgactcgactcgatgaacaagtcaaaagagcatggatttctcggtttcagaaactccaagaattgcttcctgtactggattcacaaacttaaggcctacaagattgtccccagctctacaatttct

SEQ ID NO: 1161 - DNA, 1164 bp, Catharanthus roseus
atgtcctggtggtggaagcgaagtatcggtgccggaaaaaacctgcccaaccaaaacaaggagaacggtgtttgcaagtcttacaaatctgtggctctggtggtcggcgtcaccggcatcgtgggatccagtctcgctgaggtgctcaagctcccggacacccctggaggtccttggaaggtctacggagttgccagacggccctgccctgtatggttagctaaaaagcctgtcgagtacatccagtgcgacgttagtgataaccaagagacaatttcgaagctctctcctcttaaggacattacccatattttctacgtgagttggattggctcagaggattgtcagactaacgctactatgttcaagaacattcttaactcagtcattcccaacgcctcgaacctgcagcatgtgtgccttcagaccggaatcaagcactactttggaatcttcgaggaggggtctaaggttgtgcctcatgatagcccattcactgaggacctcccccgactcaacgtgcccaacttctatcatgacctggaggacatcctctacgaggagaccggcaaaaacaacctgacctggtctgtccatcgaccagccttggtgttcggcttcagcccctgctcaatgatgaacattgtttccacactttgcgtttacgcaacaatttgtaaacacgagaacaaagccctggtttaccctggctccaagaactcttggaattgttacgctgatgctgtggacgctgatctggtggcggagcatgaaatttgggccgccgtagatcccaaggccaagaatcaggtgctcaactgcaacaacggtgacgtatttaagtggaagcatatttggaagaagctcgccgaggagttcggtattgaaatggtaggttatgtcgagggaaaggagcaagtctctttggcggaactcatgaaggataaggaccaggtctgggacgagattgtcaagaagaacaacttggtgcctaccaagctgaaggagatcgcggccttctggttcgctgacattgccttttgtagcgagaacctgatctcttctatgaacaagtccaaggagctcggttttcttggattccgcaacagcatgaagtcatttgtgtcgtgtattgacaagatgcgggactaccggttcattccc

SEQ ID NO: 1162 - DNA, 1164 bp, Catharanthus roseus
atgtcttggtggtggaaaagatcaataggtgccggcaaaaatctcccgaaccaaaacaaagagaacggggtatgcaagtcgtacaaatcggtcgctctagttgtgggcgttactggtattgttggcagttccctagccgaagtccttaaattgcccgatacccctggtggtccgtggaaagtatatggtgtcgctaggcgtccatgtcctgtatggcttgccaagaaacctgttgagtacattcaatgtgatgtgtccgataatcaagaaaccatatcaaaattgagccccttgaaggatatcacccacattttctacgtatcttggatcggatctgaagactgccaaactaatgccacaatgttcaaaaatattctgaatagtgtcatacccaatgcttctaatttacagcatgtttgtctacaaaccggtattaaacattattttggcatatttgaagaaggttctaaagtagtgccgcatgattctccatttaccgaggatcttcccagattgaatgttccaaatttttaccacgacttagaggacatattatatgaggagacaggaaagaataacctcacgtggtctgtgcatagacctgcattagtattcggattttctccctgcagtatgatgaacattgtgagtactctttgcgtgtatgcgacaatttgcaagcatgagaataaggctttagtttacccagggagcaagaatagctggaactgttatgctgatgctgtagatgcagatttggtagccgaacatgaaatctgggcagccgtcgatccaaaagccaaaaatcaagtattaaattgcaacaatggggatgttttcaaatggaaacatatatggaagaaactggccgaggaattcggtattgaaatggtagggtatgttgaaggtaaagaacaagtctccttggcagagctaatgaaagataaggatcaagtttgggacgagattgtaaaaaaaaataacttagttcctactaagttgaaagaaatagcagctttttggtttgctgatattgcattttgctctgaaaatctaattagttcaatgaataagtccaaagaattgggatttttaggttttaggaacagtatgaagtcttttgtttcctgcattgataagatgagggactacagatttattccg

SEQ ID NO: 1163 - DNA, 1188 bp, Nepeta mussinii
atgtcgctttcgtggtggagagccggagccgctaaaaagagaatggatgatgatgaatcccttttggttaaacaacagcagcagcaatgtgtggctctaattgttggcgtcaccgggttagtgggtaattcactagcagaaatgttaccactaccagatactccaggcgggccatggaaagtgtatggcgtagcaagacgggctcgtccttcatggaatgaagatcaaccaatgacatatatatcatgcgatgtcagtaacaccggcgaagtggaagccaaattatctcctttgtcagatgtaactcatattttttacgctacgtggacgtctagatccacagaggaggaaaattgtgaagcaaatggcaaaatgctcaaaaatgttctagatgcaatgataccgaattgccctaacttgaaacacatttgtctacaaaccggtagatttcattatgttgcttccgttgtagactggaagatcaatggatcacacgacaccccactaaccgaagacttgcccagattaaaaactaacaatttttattatacccaagaggacattcttttagaggaagttaagagaaaagaaggtcttacttggtcggttcatcgtccaggtacaatcttcggattctctccttattccatgatgaatctcgttggtacattatgcgtctatgctgccatatgtaaacaagaaggtgcagttttgcgatttcccggttgcaaaggtgcgtgggatggacattctgactgtgctgatgccgatttgatcgctgaacaacaaatatgggccgcattagacccgcatgctaagaaccaagctttcaatgtatcgaacggagatttattcaagtggaaacatttatggaaagttctcgccgaccaatttggtgtggagtgtggtgactatgaggaaggacaacagttgagattgcaagacgttatgaaagacaagggtcctgtttgggacaagatcgtggcagaaaacggactttctaacacaaagctcgaagacgtcggtaagtggtggttttccgacacaattttgtggaatgaatgtcgcttggattctatgaataaaagtaaagaacatgggttcttaggtttcagaaattcaaagaattgctttttgtactggatacataaagtcaaagcctacaatctcgtgccaagtacatatacg

SEQ ID NO: 1164 - DNA, 1191 bp, Nepeta cataria
atgtctatgaactggtggagagatggagcggctaagaagaggatggatgaatcctcggccgttaagctacaacagcaacagtgtgtggccttgattgtaggtgttacgggtctagttggaaactcacttgccgaaatgctgcccctttcagacacaccaggagggccctggaaggtatatggtgtggccaggagaccaaggccctcatggaatgaagatcacccaataaattacatttcatgtgatgttagtaacactgctgaagttgaggctaaactgccacctttgtcagatgtaactcatatattttatgcaacttggacatctagatcctcagaggaagaaaactgcgaagcaaacggcaaaatgttgaagaatgtattggataccatgatccctaattgtccgaatttgaagcatatttgcctgcagaccggtagatttcactatgttgcctcagttgtggattggaaaatcaatgggtctcatgatactccattaacagaagacttacctagattaaatactaataacttttattatacacaagaagatattctgctcgaagaagtgaaaagaaaagaagggttaacctggtctgttcaccggcctggaactatttttggtttctccccttatagcatgatgaatctcgttggtactctgtgtgtgtatgcagcaatttgtaaacaagaaggtgcggtcttacgattccccggttgtaagggtgcatgggatgggtatagcgactgtgctgacgcggatttaatcgcggaacactatatttgggcagctttagacccacacgctaagaatcagtctttcaatgtctcgaacggtgatgtttttaaatggaagcacctgtggaaagtgttagcagaacaattcggtgtcgaatgtggcggttatgaatatgaggaggggcaacaagttcggcttcaggacgtaatgaaagacaaagggccagtttgggacaagatcgttcgcgaaaatggattgtcgaacacgaagctagaggatgttggtaagtggtggttttcagatacgattttgtggaacgaatgtagattggatagcatgaataaatccaaggaacatggattcttaggcttccgcaactcaaagaattgctttctgtactggattcacaaattaaaagcttataagattgttccttcctccactatttca

SEQ ID NO: 1165 - DNA, 1176 bp, Olea europaea
atgtcctggtggtttaatcgttcagttaacggatgtaaacaaaaaaaaatccaggaaaatggtgttcaacagcagcagaatggcgatattcaaagttttaaatctgtagccttgattgtaggtgttactggcattgtcggatcgtctttaagtgaaattttacaatatactgacacgcccgggggtccttggaaagtttatggagtagccagaaggccaaggcccacatggttggctaaatcacatgttgagtatgtccaatgtgatgttacaaatactgaggagaccatttctaaaatatcaccacttactgacataacacacattttttatgtatcttggatgggtaatgaggattgtagtatgaacgctgtaatgttccagaacatacttaattcggttattcccaatgcgcctaatctgcagcatatttgtctacaaacaggcagtaaacattacattggccttttcgaaaccgatactcctgagagtcatgacactccatactccgaagacttagctaggctcaaacaacccaacttttaccataaccttgaggatattttatttgaggaaactgcaaagaagggcttaacttggtcagttcatagaccagccttgatattcggattttcgccctgctcactgatgaatattgtatctaccctgtcagtttacgctgcaatatgtaaacatgagaacaagccattagtttatccaggtagcaaagccagttggaattgttttgtggatgccgctgatgctgaattagctgcggaacaccaaatttgggcggctgttgatccaaatgcgaagaatcaagctttcaattgtaccaacggcgacttattcaagtggaaacatatttggaaagttttagccaatcaattcgatttggaaatggttggttatatagaaggtaatgagcaagtgtcaatggaagaattaatgaaagataaggattccgtatgggacgaaatagttaagaaaaacaacttgatgccgactaaattaaaagaaatcgccgcattctggttcgctgacattgctttttgtcttgaaaacgttctctcgtcgacacacaaaaatcgattgcatggcttcatgggttttcgaaatacatatactagttttgtgagctgtatcgataaaatgagagcttacaggttcattcca

SEQ ID NO: 1166 - DNA, 1101 bp, Catharanthus roseus
atgggggtatgcaagtcgtacaaatcggtcgctctagttgtgggcgttactggtattgttggcagttccctagccgaagtccttaaattgcccgatacccctggtggtccgtggaaagtatatggtgtcgctaggcgtccatgtcctgtatggcttgccaagaaacctgttgagtacattcaatgtgatgtgtccgataatcaagaaaccatatcaaaattgagccccttgaaggatatcacccacattttctacgtatcttggatcggatctgaagactgccaaactaatgccacaatgttcaaaaatattctgaatagtgtcatacccaatgcttctaatttacagcatgtttgtctacaaaccggtattaaacattattttggcatatttgaagaaggttctaaagtagtgccgcatgattctccatttaccgaggatcttcccagattgaatgttccaaatttttaccacgacttagaggacatattatatgaggagacaggaaagaataacctcacgtggtctgtgcatagacctgcattagtattcggattttctccctgcagtatgatgaacattgtgagtactctttgcgtgtatgcgacaatttgcaagcatgagaataaggctttagtttacccagggagcaagaatagctggaactgttatgctgatgctgtagatgcagatttggtagccgaacatgaaatctgggcagccgtcgatccaaaagccaaaaatcaagtattaaattgcaacaatggggatgttttcaaatggaaacatatatggaagaaactggccgaggaattcggtattgaaatggtagggtatgttgaaggtaaagaacaagtctccttggcagagctaatgaaagataaggatcaagtttgggacgagattgtaaaaaaaaataacttagttcctactaagttgaaagaaatagcagctttttggtttgctgatattgcattttgctctgaaaatctaattagttcaatgaataagtccaaagaattgggatttttaggttttaggaacagtatgaagtcttttgtttcctgcattgataagatgagggactacagatttattccg

SEQ ID NO: 1167 - DNA, 1110 bp, Nepeta mussinii
atgcagcaatgtgtggctctaattgttggcgtcaccgggttagtgggtaattcactagcagaaatgttaccactaccagatactccaggcgggccatggaaagtgtatggcgtagcaagacgggctcgtccttcatggaatgaagatcaaccaatgacatatatatcatgcgatgtcagtaacaccggcgaagtggaagccaaattatctcctttgtcagatgtaactcatattttttacgctacgtggacgtctagatccacagaggaggaaaattgtgaagcaaatggcaaaatgctcaaaaatgttctagatgcaatgataccgaattgccctaacttgaaacacatttgtctacaaaccggtagatttcattatgttgcttccgttgtagactggaagatcaatggatcacacgacaccccactaaccgaagacttgcccagattaaaaactaacaatttttattatacccaagaggacattcttttagaggaagttaagagaaaagaaggtcttacttggtcggttcatcgtccaggtacaatcttcggattctctccttattccatgatgaatctcgttggtacattatgcgtctatgctgccatatgtaaacaagaaggtgcagttttgcgatttcccggttgcaaaggtgcgtgggatggacattctgactgtgctgatgccgatttgatcgctgaacaacaaatatgggccgcattagacccgcatgctaagaaccaagctttcaatgtatcgaacggagatttattcaagtggaaacatttatggaaagttctcgccgaccaatttggtgtggagtgtggtgactatgaggaaggacaacagttgagattgcaagacgttatgaaagacaagggtcctgtttgggacaagatcgtggcagaaaacggactttctaacacaaagctcgaagacgtcggtaagtggtggttttccgacacaattttgtggaatgaatgtcgcttggattctatgaataaaagtaaagaacatgggttcttaggtttcagaaattcaaagaattgctttttgtactggatacataaagtcaaagcctacaatctcgtgccaagtacatatacg

SEQ ID NO: 1168 - DNA, 1119 bp, Nepeta cataria
atgcaacagtgtgtggccttgattgtaggtgttacgggtctagttggaaactcacttgccgaaatgctgcccctttcagacacaccaggagggccctggaaggtatatggtgtggccaggagaccaaggccctcatggaatgaagatcacccaataaattacatttcatgtgatgttagtaacactgctgaagttgaggctaaactgccacctttgtcagatgtaactcatatattttatgcaacttggacatctagatcctcagaggaagaaaactgcgaagcaaacggcaaaatgttgaagaatgtattggataccatgatccctaattgtccgaatttgaagcatatttgcctgcagaccggtagatttcactatgttgcctcagttgtggattggaaaatcaatgggtctcatgatactccattaacagaagacttacctagattaaatactaataacttttattatacacaagaagatattctgctcgaagaagtgaaaagaaaagaagggttaacctggtctgttcaccggcctggaactatttttggtttctccccttatagcatgatgaatctcgttggtactctgtgtgtgtatgcagcaatttgtaaacaagaaggtgcggtcttacgattccccggttgtaagggtgcatgggatgggtatagcgactgtgctgacgcggatttaatcgcggaacactatatttgggcagctttagacccacacgctaagaatcagtctttcaatgtctcgaacggtgatgtttttaaatggaagcacctgtggaaagtgttagcagaacaattcggtgtcgaatgtggcggttatgaatatgaggaggggcaacaagttcggcttcaggacgtaatgaaagacaaagggccagtttgggacaagatcgttcgcgaaaatggattgtcgaacacgaagctagaggatgttggtaagtggtggttttcagatacgattttgtggaacgaatgtagattggatagcatgaataaatccaaggaacatggattcttaggcttccgcaactcaaagaattgctttctgtactggattcacaaattaaaagcttataagattgttccttcctccactatttca

SEQ ID NO: 1169 - DNA, 993 bp, Nicotiana tabacum
atgggtctgggaccctatactgtttatttcgatgctttatgtatcggcttgggagcaattctaatgcaagactcgcgtatgattgcttacgcctcgtatcaattgaatacacacgaaaagaattaccatgtacatgacttagaattggcaagtattgtacatacgttgaatatttggggcgctttgattgttagaagagtaatgggcgttactaaaaaatattcggatttaaagcagcattacttgtggagaaagatggagaaagatatcataggtcacgtttcacaatgcttaaattgtcaacaagtcaaataccaaaagctaggtggcttgacacaaagattaacgaaatctgttcatttcatacccgtaattacgtcctatacttcagaaagaaagccttccattacttggtctgttcatagacctgatatgatttttggtttttcgccccattcgacactaaacatagttgggacgctttgtgtatatacaactatctgcaaatacgaaggaatacccttgaagttcccgggtacgaaggcccgttgggatagttattctaatgctagcgacgcagacttagttgcagagcatgaaatatgggcagccttatgtcccagggctcaaaacaaggcgttcaatattacaaatggtgacgtctttaaatggaagcatctttggaaagtgctagcggagcaaattggagtagagtacgtgggttttgacgaaaccgaaaaacgtatttgtctagcggaaatgatgaaagacaagggtcacgtatgggacaaaatcgttcgagataataacttggtttcaactaccctggaagaagttggcttatggcaattcgctgatatgatattagccgggggatcaaaccgattatcttcaatcaatagaagtaaggagcacggtttcatgggattcagaaacagtacgaacagctttatattctggatccagaaagctaaggacaatcgtttaataccc

SEQ ID NO: 1170 - DNA, 1200 bp, Elaeis guineensis
atgtcttggtggtgggcaggtgcaataggagctgctagaaagaaatttgatgaagactcaggtggtgggggtgcagctgccaaattcccttctgttggtttggtaatcggtgttactggtatagtcggtaattctttggctgaaattttacctttggccgacacacccggtggtccatggaaagtgtatggagtttctagaagacctcacccctcttctcttgcctcccaaacagagggtctggcgatagaacacgtccagtgtgatatctctgatagagaagacgcacttgctaagctcagccccctaactgatgttacccatatattttatgtggcttgggttaataggtctactgaagcagaaaatcgagagattaactcagcaatgttaagaaatgttctaactgccgttattcccaatgcacctaacctgcaacacgtatgcctgcaaacaggtagaaagcattatctagggagtttcgaatcactgggtaaagttaagggtcatgaaccaccgtttgtcgaggacttaccaaggttagactgtccaaacttctactacgatctcgaagatatattatttgaagaagttgcaaagagagagggcgccgttacttggtctattcataggcccactaatatattcggtttctcaccatcatctctaatgaatctgatgggtattttgtgtgtatatgcagctatctgcagaagagaaggcgtaccattgcgctggcctggttccagagttctatgggagggtttcagtgacgctagcgatgctgatttgatagcagagcaccaaatttgggcagcggtcgatccttacgctaaaaatgaggcctttaattgttctaatggtgacgtttttaagtggaagcatttgtggccgttactagctaaagaatttggcgtcgaatgggtggggtaccagggcgaggaagctcgttttaaactagaggacgcaatgaagggaaaggaaggattatgggaaaaaatggttgcggaacacgaattagcaccaacgcggttggaacaagtcggaaactggtggtttgctgatgttgtgctgggtcttgaagaagaatatttagactccatgaataaatcaaaagaacatggcttccttgggtttagaaacacagtgactagtttcaattcatggatcgataagattaaggcttataagatcgtacct

SEQ ID NO: 1171 - DNA, 1200 bp, Citrus clementina
atgtcttggtggtgggcaggtgccataggcgcagcgagaaaaaaatttgaagaggatgagcctgcaaggtcatatcagtccgtcgcgcttatcgtaggagttactggcattgtcggtaactctctagcagagattctgcctcttccggatactcctggtggtccatggaaggtgtacggggtcgctagaagaccaaagccgaattggaacgccgatcacttagttgaatatgttcagtgtgacgtttctgatcccgaggaaactcaggctaaattgtcccagctcacagacgtaacccacatcttctatgtcacttggacaaatagatccaccgaagccgaaaactgcaaaattaatggttctatgtttagaaatgttttacgtgcagtcattcccaatgccccaaatctcagacatgtctgcctgcagactggtacaaagcactacttaggaccatttgaagctttcggtaaaataaaaccgtatgatcctccctttacagaagacatgccaagattagatgccccaaatttttattacacattagaagatatccttttcgaggaagtggaaaagaaggaagaattgagctggtcagtccatcgcccggatacaatcttcgggttctccccatattcattgatgaatctggtcggtgctttgtgtgtgtatgcagctgtatgtaaacatgaaggtatccctttgcgatttcccggtaccaaggcggcttgggaatgctattccattgcctccgacgccgatttaattgctgagcaccaaatttgggccgcagtggacccttatgctaaaaacgaggcttttaattgtaacaacggagatgtttttaagtggaaacatctttggaaagttttagccgaacaatttgggatcgaagattacggcttgagtgaggaagaagaagaagaagaagaaggaggtggtggtacccaaagggttaaattagctgaatttatgaagggtaaagaaggcgtttgggaggagattgttagggagaatcaactgcaacccactagattggacgaggtcggtgcgtggtggtttgtggatttggttttgaccggcgaagctaaattggcctcaatgaataagtctaaagaacatggcttcagcggttttagaaattcaaagaactctttcataacctggattgacaaggcaaagggttataaaatcgtacca

SEQ ID NO: 1172 - DNA, 1173 bp, Sesamum indicum
atgtcctggtggtgggctggagccgttggtgctgcaaagcaaaagaaactagaagaggatgaagcacctcaaaaacatgaaagtgtcgcacttattattggcgttaccggcctagttggcaattccttagcggagattttaccacttagtgataccccaggaggtccttggaaagtgtacggtgtcgcgagacgtccgcgcccaagttggtccgacgattatccgattaactatatacaatgcgatgtattgaatcgtgatgatacacaagctaaattatctacattaactgacataacacacgttttctatgcaacatggactaacagaccaaccgaagctgaaaattgtgaagcaaacggtaggatgttacaaaatgttttagatgctgtgattcctaattgcccgaatttgaaacacatttgcatgcaaacgggtaggaaacattacgtgggtccattcgaagcatttggcaagttggaaacacaactagaaactccatatacagaggatatgccaagattgaattacattaacttttactacactttggaagatattttgtgtaaggaggtagaaaagaaagagggattaacttggtctgttcacagaccgggtactatatttgggttctccccacatagtatgatgaacttggtcggaaccttatgtgcgtacgcggcaatatgtaaacacgaaggtaaggttttgaggtttccaggatgtaaagaagcttgggatggatactcagattgtagcgatgcagacttaatagcagagcaccaaatatgggccgccgtggaccctcatgcaaaaaatgaagcttttaacgtcaataacggtgatgtctataagtggaaacacttatggaaggttttagcagaacagtttggtgtagaatgtggcgaacatgaagaggggcaaaccattacctttgaaggacttatgaaagacaaaggtggcgtttgggacgagatggtacgtgaaaatggccttacaccgactaaactagaagacgttggtttatggtggtttgctgatgttattttgggtaacaagtgcttccttgatactatgaacaaatccaaagaacatggattcttagggttccgaaatagtaagaaaagttttatttcttggatagaaaaagtcaaagcaaataaaatagtacct

SEQ ID NO: 1173 - DNA, 1167 bp, Camptotheca acuminata
atgtcgtggtggtgggctagatcacttggggcacagaaagaatttaaggaaaacggtgctttaactagttatcaatcagttggtcttattattggggttaccggcattgtaggtaactctttagctgagattctacctttaccagacacacctgggggcccgtggaaggtttacggtgttgcgagaaggccgagaccagcttggaacacggatcaccccatcgaatatatccaatgtgatgtggcttcaaccgaagacactttggccaaattgtccccattgaccaatataacacatatcttctatgttgcgtggaccggttctgaagattgcgaagttaatgagactatgtttcataatgttttaaaggcggttattcctaatgcgccaaaccttaggcatatctgtatccaaacaggtataaaacattatacaggccctctagatccagatggaggaattcagcctcatgactcaccattcaccgaagatcttccacgtttaaatgcacccaatttttatcataatttggaagacattttaattgaggaagccgcaaaaaaaaagggactcacctggagtgttcacagacctgcactggtgtttggtttttccccttatagtatgatgaacataattggagcgctatccgtttacgctgtgatctgtaagcatgaaaacaaaccattgatttaccacggtgcacctgataatagtcgtgattcatggaatgtttacgctgacgcggctgacgcagacttaatagccgaacatcaaatttgggcagcagtagactcgaacgctaagaatgaagtgtttaattgttcaaatggagatgtttttaagtggaaacaaatgtggaagattttagcggaacaattcgaggtggaacttgttggttatgaggatggtcaaaagagaatgtccctacaagaaagaatgaaaggaaaaggtccagtatgggatgaaattgttaggaaacacaaattgctgccaactaaactggaagacgtcgcacaatggtggtttgctgacatagtttctcagtcacaaaatttagttaatggtgttaacaaatcaaaagaaaatggctttttaggtttcagagacagtaaaaagtcctttgtatattggataaaaaaaatgagagctgcgaaaatcataccg

SEQ ID NO: 1174 - DNA, 1173 bp, Cinchona pubescens
atgtcttggtggtggaagagatcaatagatgcggggaagaattcgggcaaaaaattggaagttaatgaaaacgaggcaatagttgaagattacaagtccgttgctttagtggtaggcgtgacaggcatagtcggctcatctcttgctcaagtgttggcattgcctggcactcctggaggtccttggaaggtatacggtgtagcaaggagatcaagaccggtctggttcagcaaaaatcatctggaatatatacaatgcgatgtcagtaatacacaggaaacaatctccaaattgtctcctctaacagatataactcacattttctatgtcagctggatcggtagtgaagattgtgatataaatgctacgatgtttaaaaatattctgaatactgtaataccaaatgcgccaaagctgcaacatatatgcttacaaacaggtatcaagcattattttggaatttttgaggagggttctaaggtggaaccacacgatagcccattcacagaggatttaccacgtttagatgtacctaacttttaccatgaccttgaagacatcttgtatgaagaaactagcaagaacaatcttacatggtctgtccaccgacctgctttggttttcggtttttctccttgtagcctcatgaacattgcttctacattgtgtgtatatgctacaatctgcaaatacgaaaataaaccattggtctatactggatctaaagcttcctggaactgttatagcgatgctgtagacgccgatctaatcgctgaacaccaaatttgggcggccgtagatccaaaggccaagaaccaagtattaaattgtaataatggtgacgtgtttaaatggaaacatgtttggaagacattggctgagcaatttggccttgaaatggttggttatattgagggtaagcaacaggtttcacttgctgaattaatgaaagataaggacttagtttgggatgaaattgtaaagaaacataatttggctcctaccaagcttaaagatatcgctgccttttggtttgctgacattgcattttgttctgagaattttttatcttctatgaataaaaacaaagaattagggtttctcggttttcgagatagtattaagtctttcaactcatgtattgacaaaatgagagcatatagattcataccc

SEQ ID NO: 1175 - DNA, 1179 bp, Ophiorrhiza pumila
atgtcttggtggtggaaaaggtccatcggcgaaggtcaaaactctgctaagacgagtgaagaaatcaacggtctgaacggggaggacgaccaagactacaaatctgtgggcttagttgttggagtaactgggatcgtcggttcctccctggcacaagtcttgaccttgtctgatactcctaatggcccatggaaggtttatggtgttgcaagaaggagaaggccagattggttttcaaagcaacatttacattacatacaatgtgatgtttctaacacacaggaaaccatatcaaagttatccccattaacggatataactcacattttctatgttagctgggtcggatccgaagactgtgacacaaatgcaacaatgtttaagaatattgtgaatatcgttattccgaatgccccaaatttaaaacatataagtcttcaaactggttcaaagcattattttggaatttttgaggagggctctaaggttaagccaaatgaaagtccgtttaaggaggatatgccgcgattggatgttaagaatttttaccatgatctcgaagacatcttatatgaggagacctccaagaacggtttgacatggtccgtacaccgaccagcgctagtctatggcttttcaccctgctcgatgatgaatatagtcagtacattgtccgtttatgctactatctgtaaacatgagaatcggccattaacttatcccggctcaaaggcttcctggaattgttacgttgattgcgtagatgctgaccttattgcagaacatcatatttgggctgccgtggatccaaaagcaaaaaatcaaattctgaattgtaccaacggcgatgtatttaaatggaagcacatttggaaggcacttgctgaagagttcggtttagaaatggtaggctacattgagggcaaagaacaagttagtatggctgaactaatgaaggataaagatttggtgtgggatgaaattgtcaaaaaaaacaatctggtccctactaaacttaatgacatcgcagcattttggttcgctgatatcgcattcagctgtgtggatcttctgtcttctatgactaagtcgaaagaactcggcttcttggggtttcgtgacactatgaaaagtttctcttcctgtatagataaaatgagagcgtacagattcataccg

SEQ ID NO: 1176 - DNA, 1218 bp, Lonicera japonica
atgtcctggtggtggacaagatcaatcggtggtgaaaagggctcctcttatggtaagattgcggaacagaacggcgttcaagccaatggtaatagtcacttacataagaaggaggaaaacggtggcccagcaacttataagtcagttgcacttattgttggtgtaacgggaattgtcgggtcaagtctcgccgaaattttaccgctacaaaatacgcctggtggaccttggaaggtgtacggtgtcgcgagaaggccaagaccaagttggacagataagtccccgataaattatatccaatgcgatgttagcaacacgattgaaacagttgctaagctttctccattgacagatattacacatatattttacgtttcttggatgggttccgaagactgtgaaataaatgccattatgtttcaaaacattctggacgcagtcataccaaacgccccgaaccttaagcacatctccctacagacagggataaaacattacatgggagtgtttgagactgatacaaaacaaaaaccacacgattcaccatatactgaagacttaccaagactgaacgttcagaatttttatcataatctggaagatatattgtatgaagagaccgcgaagaaaggtttaacgtggtccgttcatagaccggcattggtcttcggtttctccccctgttcaatgatgaacatagtgtccacccttagtgtctatgctgcaatttgtaaacacgaaaacaaacctttggtctaccccggctcgaagggaagttgggattgttatgctgacgccgtcgatgctgatctaatcgcagaacaccacatatgggccgcggttgaccccaaagccaagaacgaaatatttaattgcaacaacggggacgtttttaaatggaagcatatatggaaagccttggctgaaaagtttgagctggaaatggttggttacgaagaaggtaaagaacaggtatctatggcagaaatgatgaaagacaaggaggaagtttgggatgagattgtcagagaaaacaaattggttcctacaaaattaaaggatatagccgcatggtggtttgctgatatcgcgtttgttactcaaaatgtcttatcaagtatgaacaagaataaggagcatggatttgaaggattcagaaattcaacaaagagtttcgtgtcatgcatagacaagatgaaagcttataggattatacca

SEQ ID NO: 1177 - DNA, 1182 bp, Digitalis purpurea
atgtatactgatacgacgacatggtggtacaagagatcaattggtgacatcgaacagaaaaatgttgaaaccaatggtgtcgctttgaactataagagcgttgctctgattgtgggggtgacaggcattgctggatccggtttggcagagacattatctaaatcggatactcctggtggaccgtggaaagtgtacggcgtggcaagaaggccatgtccagagtggttggctaaactccatgtttcctatattcaatgcgatatcggttcgaccgatgatacatctgcaaaattatccccgctgtctgatatcacgcatatattttacgtctcctggacgggctccgaagattgcgataaaaacgccatcatgtttaagaatatcctcgattcagtaatcccaaatgcccctaacctaaagcatatttctttacagaccggcattaaacattactggggtaatatggttgatgagatggacaccaccaatgtttctcatgactgtccattttatgagaacatgcctagactcagacagcctaatttttattataatctcgaggatcttctctatgaagcttgtggtactcaaaacggtgccttgacatggactgtgcatagaccagctttgatcttcggtttctctccttgtagcttaatgaacattgttgcaacattaagcgtgtatgctgccatctgcaagtacgagaacaaacccctggtgtatacagggacggagacttcctggaattgtttggtagatgctgtcgacagcgatctattggcagatcatctagtttggggtgccatctcccctaacgctaaaaaccaggcttttaatatcaataacggtgacgtgttcaagtggaaacatatttggaaggtccttgcggaccaatttgaaattgaatttgtcggatacgaaggtaaagagccagtctcattagaaggtctaatgaaagacaaggatagtgtatgggatgaaatagtcgagcgatacgatttggttcctaccaagttgaaagatattgctgcgttttggtttgctgacgtagctttttctatagaaggtgctgtctctagcatgaataagaacaaggaatttggtttcatgggatttagagactctacgaaatcgtttatttcctctgtcaacaaagtcaggacctataggtttgtcccc

SEQ ID NO: 1178 - DNA, 1167 bp, Antirrhinum majus
atggcgtcatggtggtggaaaggtgcgattggtgcggcaatgaccaaaagcgaagataacgataaagcaccacagaacgtggcgctgatcgtgggtgtaactggcatagtaggtaattcacttgcagaaatcttaccggttagcgataccccgggcggtccatggaaagtgtatggcgtagcacgtcgacctcgtcccgcctggaatgccgatcacccggttcagtacattcagtgcgatgtgagcgaccctactcagacacagagcaaactagcaccccttacagatatcacgcatatattttgggtgacgtgggccaaccgcccgacggaagcggaatgctgcgatattaacggcaccatgttacagaacgtatatgatgctttactgcctaatgcgccgaatttgacgcatatctgcattcagacaggccagaaacattatattgggccattcgaaactttcggcaaagtcaaaccgcacgaaacgccgtttgttgaggatgtcccgcgtctcgatgttcctaacttctattacacgcttgaagacctcaccctggaggcgtgcaaaaaaaaggaaggtctaacctggtcggtgcatcgtcctgcggccatttttggtttctcgccgcacagcatgatgaatatgatggattcattatgcgtatacgcggcgatttgtaagcacgaaaatgttccattgaaatttccaggtaccaaggcctcttggaattgctattttgtgtgttcggacgctgatctgatagcggaacagcagatttggagctccgtggatcttaatggcaaaaacgaagcattcaactgttcgaacggtgatttgttcaaatggaaacagatgtggaaagtgctggccgatagttttgaagtggaatacgaagaatttgatgaaaatcaagagtacgttagcctggccgaacgaatgaaagacaagggcccggtatgggacgagatcgtcgagaaaaacaacctcctgcctacaaaacttgaggaagttgccactttctggttcgcggatctgatgttttatggtgaatgtatgctcgacaatatgaataaatctaaggaacatggcttctttggcttccgcaacagcgaaaaaaccgttctatcagtaatcgataaaatgaaagcgcacaaaattgttccg

SEQ ID NO: 1179 - DNA, 1098 bp, Trifolium subterraneum
atggatgagggcgtgaaaggaagctgcgaagaggatgaagagttcaaggaagcaccccgttcatcccagaatatcgcactcatcatcggcgtgacgggaattgttggaaacagcctcgccgaaattctgccattaaaagatacccctggcggaccatggaaagtgtatggtgtcgcgaggcgcccacgcccgatgtggaatgcggacaaccctatacactacattcagtgcgatgtaagtgaccaaaatgatgttgagctgaaattgaccaccctgacggacgtcacacacatcttttacgtctcgtggacctcacggccaacggaagcgcagaattgtgaagtgaatggctcaatgctgcgcaacgtgctacgctctttaattccgaacgcgcctaacctatgccatgtaagcttgcagacaggcgccaagcattatgtgggcccatttgaaactatcggtaaaattaaaccgcacgagtccccgttcatggaagatgtcccgcgtctggatacgcttaacttttaccacacccttgaagacatcttgtttgaggaggtggggacctgtatgatgaacctaatcggaacgttatgtgtgtacgcggcgatttgcaaacacgaaggattaccgctacgattccctggctcgaagggcgcgtgggaatgttacagcactgcgtcggatgctaatctgatcgccgagcagcatatttggggcgcagttgactcaaacgcgaggaataaagcatttaactgctcgaacggcgatgttttcaaatggaaacatttgtggaaagtattagcggataaatttggcattgaagattacggcttcgaagaaggattggagcttaaattgacggaggttatgaaagataagcgcggggtctgggaggaaattgtccgtgaaaatgggctacagccgaataagctggaagatgtaggcgactggtggttcgcggactttactctgcgcgtggaaggcgtgttggattccatgaataaagcaaaagagcatgggttcctgggttttcgtaacagcaaggacagctttgtgagctggatcgatatgacgaaagcctacaaaattgtacca

SEQ ID NO: 1180 - DNA, 1356 bp, Corchorus capsularis
atgggagccaatcagaaaaaagtaaaattaaataaggacgacgggtcagttctggcgttctggacgacactgggctcgggtcagtcattttgggtacgtaaaatcacatctttttattttcgtagttgcttcgaagactttgcacacctgcgtatcagcagctgggattttgatttcggagtgggctgtggctttcgtgtagaatggggagccctcgaaaaaaaattcgaaggcgatgaagcaccgtcaaattttgaaagtgtggggctgatcgtgggggtgaccgggattgtgggtaatagcttggcggaaattttaccgcttagtcatgacactccgggtggtccctggaaggtttacggcgtggcccgccgcccgcgcccgtcgtggaatgccgatcaccccatcgagtatattcagtgtgatatttccgatagcaaagatacagaagcgaaattaagcccgctgaccgatattactcacattttttatgttagttggacgaaccgttcatccgaagcggaaaactgcaaaatcaatgggtcgatgttccgcaatgtactgcgtgcggttatccctaatgcgcccaacttacgtcacatttgtctgcagactggtggcaaacactatgtgggcccgtttgaatcattttgtaaaattcagcttcatgaaccgccctttacagaagatctcccgcgccttaatacgccgaatttttattacacccaggaagatattctgttcgaagaagttcagaaaaaagagggtctgacttggagcgtacatcgcccaaccgcgacctttggtttctcaccgtactcattgatgaacgtgattggcactctatgtgtatacgcggcaatctgcaaacatgaaggcaaaccgttgctgtttccaggtaacaaagacgcgtgggagggtttcagcgaagccagcgatgccgatttaattgcggaacatcagatttgggcggccgtggatccttacgcaaaaaatgaagcgtttaatgtgtcaaatggcgacctcttcaagtggaagcacttatggaccgtcttggcggaacaattcggcattgaagaatacggcttcgaagaaggaaaaaatttaggcctgcaggaaatgatgaagggcaaagagcgcgtttgggaagagattgtgaaggagaatcagttgcaagaaacgtcgctagcggacgtgggagtgtggtggttcgccgatctggtgttgagtgtttcggcggcgatggctatgttatctatgaataaaagcaaagaacatggcttcttgggcttccggaattcgaaaaatagctttgttacttggattgataaaatgaaggcgtacaagatcgtaccg

SEQ ID NO: 1181 - DNA, 993 bp, Nicotiana tabacum
atgggtctgggaccgtatactgtatattttgatgcgctgtgcattggccttggcgccattctgatgcaggattcacgtatgattgcatatgcgtcgtatcagttgaatacccatgagaagaactatcacgtacacgatctggaactggccagcattgttcacaccctaaacatctggggtgccctaattgtgcgtcgcgtcatgggtgttaccaaaaaatattccgatttgaaacagcactatctgtggcgcaaaatggaaaaggatatcatcggacatgtcagccaatgtctgaactgtcaacaggtgaagtatcagaaactgggtggtcttacccagcgcctgacgaaaagcgtgcacttcatcccggtgattacctcttataccagcgaacgcaaaccttcaatcacttggtcagttcaccgcccggacatgatcttcggcttttcacctcatagcacattaaacatagttggtaccttatgcgtgtataccacgatttgcaaatatgagggcattccgcttaaatttcctggcacgaaagcgagatgggatagctatagtaatgcaagcgatgcggatctagtagcagaacatgaaatatgggcggcgctgtgtccccgtgcccaaaacaaagcgttcaacattacgaatggtgacgtgttcaaatggaaacacttgtggaaagtactggccgagcagattggagtggaatacgttggcttcgatgaaacggaaaagcgcatctgtctggccgagatgatgaaagataaaggtcacgtgtgggacaaaatcgttcgtgacaacaatctggtttccaccaccctggaagaagtgggactctggcaatttgccgatatgattttggcgggtgggtctaatcgcctgtcaagcatcaaccgtagcaaggaacatggttttatgggctttcgtaattcaaccaactcgtttattttttggattcaaaaagccaaagacaatcgcctgatcccg

SEQ ID NO: 1182 - DNA, 1227 bp, Panicum hallii
atgattcgttggtgctggactggagaacacggcgcagtccaggagcgtcgcgccgccgataccgaggctgcggcaccggcatttgccaatgtcgcccttgtagtagggtcgaccggaacagtaggcgccgcgctggtcgacatgctccaaagcactgatgcgccggcgggcccgtggaaggtatatgccctgtgccgccggccactcccgccttggtgtaccagtggtagtgcagcgtccacaagctcaccgaacgccgtcgtcgtgtcgcttcaagttgatttggcgaatgctgccgcggtggcagcggctctggcccccctagcggatatcacccacgtgttttatgccgcgtggagcccccaacgtggtagtccagatgctgtagcatgcgaaacgaaccgcgcgatgctgcgtaatgtgttaagcgcagtggttccgtcttgcccggcgttagcgcatgtttgtctgcagaccggtagagatcagttcgtggacccgtttgatcctgtgatgggtaccacctctgcgacccgtccgtactccgaagatcttccgcggctggaacatccggatcttgaagatgtgttactgattgaattacctggctttgtggcgtcacgccgtgatcgtgccccggtgacgtggtcggtgcaccgccctgcgacggtatttggtttttcaagccgcagtgggcgcaatgttgtctcttcgctgtgtgtgtacgcggcaatttgccgcaaggaaggcgcagcgctccgctggccgggcagtcgggtcgcctgggaaggtttctcggatgcgagcgatgctgagttggtggccgaacatgcgctctgggccgctctggaactacgctgtaagaatgaagccttcaactgcacgaatggtgatgtttttaaatggaagcagctgtggccagccctggcgaaacacttcgcggtggaatggagcggctatgatggagaggacaaacgctttaagttagaagaggcgatggcgggcaaagaagcggtgtggacggaaattgtgagagaaaatggcctgctggagactaaactggacgataccaccacttggtggagcgttgatgcagtactgaatgcagatcaggaacaggttgataccatgaacaaatccaaagagttgggattttttggtttccgccatacggttagaagctttgatacctggatcactaaactgaaagccagcggcatcgtgccc

SEQ ID NO: 1183 - DNA, 1098 bp, Medicago truncatula
atgattagcgatttgagcatctaccactttggtgcacatcatatcaccgaatttaaggaaagcccgcgcagctttcagaacgtcgccctcattattggagtgacagggatcgtcggcaacagcctggccgagattctgccactcgacgatactccgggcggcccgtggaaagtttatggcgtagcacgtcgtccacagcccaatctgagtccgctgaccgacgtgacccacattttctatgtctcttggactagtatgcctacggaggcccagaattgcaaagtaaatggtagcatgttacgcaatgtgctgcgcgcacttattccgaataccctgaatctgtgccacgtcagcctgcaaactggtattaagcactactttggaagtttcgagatagttggcaaaattaaaccgcacgaatccccctttaccgaagatgtaccgaggcttgtgactccgaatttttatcacacccaggaagacatactattagaagaagtaggaaaaaaaaaaggcatgacgtggtttattaaccggcctcaggtaatttttggctttagtccgtatagtatgatgaacctaattggtacactgtgtgtgtatgcagccatttgcaaacacgaaggcctgccgctacgcttcccgggtagcaaaggcgcctgggaatgctactctactgcgagcgacgcgaacctgattagcgaacagcatatttggggcgcagttgatccgaacgctaagaacgaagcatttaactgtagcaatggtgacgtgttccgatggaaacacttatggaaagtgctggcggaacgttttgaaattgatgattacggtttcgaagaggggagcgagctgcgactgagcgacctgatgaaagataaaggcggtgtgtgggaagaaatcgtgcgcgagaatgagttactgtatacgaaactggaggaggtgggcgattggtggtttgcagacttcatgtttcgtgtcgagggcgtgttggatagcatgaataaaagcaaagaacacgggtttctgggatttcgtaatagcaagaacgtttttattagctggatcgacaagaccaaagtgtacaaaatcgtgccg

SEQ ID NO: 1184 - DNA, 1179 bp, Juglans regia
atgattacgtggctgtgggcccgcgccgtgggcgcgacgaaaaagatcaacgaagcagaagaggccgtgttaccgccgggtagctaccagagtgtagggcttgtaatcggtgtaactggcattgtgggcaactcccttgcggaaatattgccgctgccggatacgcctgggggtccgtggaaagtctacggcgtggcacgtcgtcctcgcccgaaatggaatgccaaacatccggtgcattatattcagtgcgatgttagcaactcagaggaaactgaagcgaaactgtcgcagctggcagatgtgacgcacatcttttatgtcacgtgggcgtcccgtcaaacggaggccgagaattgcgaagttaacggagccatgttccgcaatgtgttgcgcgccctgattcccaatgcaccgaaactccgccatatttgcttgcaaactggtgcaaagcactacattggcccgttcgaagcatttggtaagatacagccgcatgagccgccgtttacggaagacttaccgcgccttaatgtgccgaacttctattatacccaggaagatattctgtttgaagaagccaaaaaaaaggaaggtctgacctggtctatccatagaccaaacattatttctggcttctcgccgtattcgatgatgaacatcatcggcaccttatgcgtgtacgcggcgatttgcaaacacgaaggcctgccgctgaaattccctggtaacaaagcgagctgggaggggtacagcgtggcctctgacgcggacctcatcgcggagcagcacatttgggccactgttgatccgaacgcccggaatgaagcgtttaattgcaataatggcgacgttttcaaatggaaacacttatggaaggtattagccgaacgttttggtattgaaaagtatggttttgaagaaggcgaaaaggtctcgctagttgaaatgatgaaggacaaaggaccggtttgggaggaaattgttcggaaaaaccatcttcaacccaccaaacttgaggaagttggtgtgtggtggtttgcggacctttttctgtgtgtagagggtgcccttgatagtatgaacaaatcgaaagaacacggctttctgggcttccgtaactcgaagactagcctgatcacctgggtggataaaatgaaaggtcacaatatcgttcct

SEQ ID NO: 1185 - DNA, 1002 bp, Triticum urartu
atgaaaaaaattgccggcggaaaagcatttatcatgcagagcaaacatatgaaagtgaattatctgctattaactcaggtccggaatagcccgggcgcgtttacggatctgccgcgctcggcgtcagatgccgcggcctactaccgcagtgaggagggctcaagcaccgaaaaagtattttggtctcagtacgctgaagccggacatctggtcccgttatcagaccaactgaaacagatggttgagctgcacaaaccgggtcgtaaacactacattggcccttatgaggcaattggcaaaattccggtacccgatccaccctacactgaagacatgccgcgcttagattatcccaatttttactacgatcaggaagatgtcctgttcgaagaagtgagccgccgtgatggtgccgtgtcctggagtgtacatcgtccgtcagtcgtgttcggcttctcgcctcgctcggcaatgaatgtcgtggcctcactgagcgtctatgctgcgatttgtcgtaaagagggcgcgatgctgcgttggcccggaagccgcgtggcctgggaaggttttagcgatgcatctgacgcagatctggtagctgagcaggaaatctgggccgccgtggatccgttagcccgtaatgaagcctttaattgctcgaatggcgatctgtacaaatggaaacagctgtggcccatggttgcggatcgctttggcgtagagtgggcgggttatgagggcgaggattctcgttttatgctggcagatgctatggccggcaaggaagcggtatgggcagagattctgcaagaaaatgaactagtaactaccgagctgcaggagattgccaactggtggttcctggatgctgtttttaacgtgaaatgcgaacacctggatagcatgaacaaatctaaagaacatggatttttaggctttcgtaataccgcgaagtcttttaatgcctggattgataaaatgaaagtgctcaaaattgtgccg

SEQ ID NO: 1186 - DNA, 1158 bp, Citrus clementina
atgctggtgcaaaacaagctcgatgaaggggaacctagccgtgacaaccagcacgttgggttgatagtaggtgtgaccgggattgtaggaaattcgctcgccgaaattttaccgcagccgaacactccgggaggtccatggaaggtttatggcgtcgcacgtcgccctcgaccagcctggaatgcagaccacccgattcagtacattcaatgtgatgtcagcgatgcagatgaaacccaagcgaaactctcgaaactgaccgatgttacccacattttttatgttacgtgggcgtcgcgtcctacagaactcgaaaactgccacgtgaatggggcgatgctccgcaacgtcctgcgcagtgtaatgccgaacgcgccgaatctccgccacgtatgcctgcaaaccggtggcaaacactatttagggccgtttgattacttcgtggacacccaattgccgcatcacccacatgatccgccgtataccgaagacctcccgcggctgaacgtgccaaacttctactatgatcaggaggacattctctttgaggaagtcgcaaaacgcgacggccttacgtggagcgtacatcgaccgttaggcatttttggcttttcaccgtattctatgatgaacattgcttgtaccctttgcgtgtacgcagccatttgtaaacatgagggtgtgccattgctgttcccgggtacgaaagaagcgtgggacgggttcactgaagtgagtgatgcggatttgattgcggaacagcagatttgggcggccgttgatccgaacgcgcggaacgaggcgttcaattgcgcaaacggagacgtgtttaaatggaagcatttctggaaagtgctggcggaacgctttgaaatcgaggattatggctttgatgaaaagggcgaacgcttacgtttagtggaaattatgaaaggcaaagaatctgtttgggaggaaattgtgcgtaaaaacaagctactaccgacgaaactgaatgaagtcgccatctggtggcatgcggacgtttcctttgatgttggtgaagatatcctggttagcatgaacaaatcgaaaggccatggctttctgggtttccgtaactccaaaaacagcttcatcgcttggattgataaaatgaaacgctacaaaattgtaccg

SEQ ID NO: 1187 - DNA, 1245 bp, Panicum hallii
atgatgcgctggtgctggacaggcgcttatggcacgattgaacgccgccacattgtagcacgagcagccgccgaagcagaagcggcagcaactgcctcccagaaagtggcattggtagtaggctctaccggagtagtcggcgcagcgttactggatattttgccgagcctggatacgcccgtagggccgtggaaagtttacgcgctttctcgcgggcctttaccgccgtggtcggctcctgcaggggcgccttccagctcctacccgaaccccgtcatccacctgcatctggatttagccgatccggccgcggtggcccaagctctgaaacctttgaccgacattacccacgtattttataccgcgtggtcagcatgcccgggcgccaccgaggacgatgcccgcgaggccagttgcgcgatgttacgtaatgtgctgagtgtagttgttccgcgctgcccggcgttggttcatgtgtgtctgcagacgggtcgcaaagggtttgtggaccctttcgagcccatgagcggattctttgcggcgattgtagcgatgcgcccgtacccggaagatgtgcctcatttagagcattctgaccttgaggacgttttcttagatgaagtggcccatagctggcttaatggagccgcgggcgctatcacctggtcggtccatcgccccgcgaccttgttcggcttttccccccgtagtgagtcaaacgtgattgcgtcactctgcgtctatgccgcaatctgctgcaaagaaggggcggccctgcgttggccgggcagtctggtggcgtgggaaggttttagtgatgccagcgatgcggaactggttgcggaacacgccctgtgggccgcgttagagccgagtggcaaaaatgaaacctttaactgtaccaacggagatatttacaaatggaagaacttatggccgatgttagcagaccattttgagatggaatggagcggatacgatggcgaagataaacgctttaaattagaagaagccatggccggtaaagaggcgttatgggccgagattgtccgcgagaaaggcctggtcgaaactgagttgaatgatatcactagctggtggtttgtggatgccttaattaatgcgggcaaagaacaaattgaaaacatgaataaaagcaaagaacggggcttcttaggatttcgtaacacggtccgaagctttaatacgtggattggcaaactcaaggccgacaaaattgtgccg

SEQ ID NO: 1188 - DNA, 1155 bp, Prunus persica
atgaatttcaagctgcaacgtaaacatgaagaagatcacgaggccccgcatacgccgaaaagtgtgggcttggtgataggagtgacaggaattgtggggaatagtctagcccgaatcctcccgcaatcggatactccggggggtccgtggaaagtctatggcgtagcccgccgtcctcgtcctcattggaacagcgactatcctatggaatatatacagtgcgatattagcgatccgaaagacactgtgtcaaagcttagccgcctgacagacgtgacccacatcttctacgttacttgggcatcgcgtagcaccgaaccacagaattgtgaggcgaatgcggccatgatcagaaatgtactgcgtgttgtgattacgaacgcgccgaacctgtgtcatgtgtgtctgcaaacaggtacccgacattatttcggcccgtacgaatcgcttggtaaagtagaaccgcaggaaccgccgtgtctggaagatctgccacgcctgaatgcacctaacttttattacgccctggaagatgtcctgtttgaagaagtgggaaaaaaagaggatttgaatataacctggagcgtgcatcgcccaggaagcatctttgggttctcgccgtactcgttagtcaacattgtggcgatgctgagtgtctatgcgtcgatatgcaagcacgaaaaaaaaccgttacgcttccccggctccgaagctgcgtggaattgttatagcgatgtttctgacgcggatctgattgcggagcaacagatctgggcggccgttgatccgaacgccaaaaatgaggccttcaatgtaaataatggtgatgtttttaaatggaaacaattttggacggtattagcagaacaatttgaaattgaggaatatggttttgatgaagaaggcggtggcttctcgctgctggagatgatgaaagagaaagagggagtgtgggaagagattgtacgtgaaaatcagctggaaccgaccaaactggaggaaattggctggtggctcctggacttgtttttcagtggggaaggcctgatgacctctatgaacaaaagcaaagaacacgggtttctgggatttcgtaacagccgtaagtccttcgtgtcatggattgacaaaaataaagcttttaagattgtgccg

SEQ ID NO: 1189 - DNA, 1152 bp, Tarenaya hassleriana
atgaatacgatcgaagccccgaagaaaaagttagatgctgaaccacactaccgctcagttggcctgattattggggtgaccggcatcgtcggcaacagcctcgccggtatcctgccgttgagtgatacaagcggcgggccgtggaaggtgtatggcgtggcacgccgcccccgtcctgactggaccaccgatcaacagattcagtacattcaatgtgatgtgtctgatgcgatcgatgtacgcaccaagttgtctccgctgaccgacgtgacccacattttctacgtgacctggaccaacagggaaaccgaatcggaaaactgtagcgcgaacgcagcaatgctgcgcaatgtgctgcgtgcagttgtgcctcacgcgccgaatttgcgtcatgtttgccttcagaccggcaccaaacattatgccggtccgttcgacaatgtggcgggacgttccttccacgatagtccattcaccgaagatctgccgcgtctgtcgcttcgcaacttctattacgatcaagaagacgttttgttcgaagaagtggagaagaaagaaggcttaacttggagtgtccaccgcccaaaccgaatctttggcttctcaccttactcgctcattaacatggtcggtagcttgtgtgtatacgccgctatctgtaaacatgaaggaagccctctgatgttcccgggttcgaaagccgcttgggagggctttaccgtggcctctgatgccgacctggtagcggaacaggagatttgggcggctacagatccgtatgcgaagaacaaagccttcaactgcaacaacggcgatgtttttaaatggaaacatctgtggaagatcctggcggaaaaatttgaaattgaggaatatggctttgaagaggaagaagggcgtgaaaaagtaggtctggtgaaaatgatggagggaaaagatcgcgtttggggcgaaattgttaaggagaaagatctcgaaaaaacgaaaatggaagaaatgggcgagtggtgggtggtagatcttattctgagggtggaaggtatggtggattgcatgaataaatctaaagaacatggctttttagcattccgaaatagcaccaaatcgtttgcttactggatcgacaaatatcgagcgcataaaattgtacca

SEQ ID NO: 1190 - DNA, 1323 bp, Capsicum baccatum
atgaacgtgttggtgtgtctacgtgattggatccgtgcggaacgccgcaaccaaggtatcgagaaggaacccaatgacaaacagcgcctggaggaaattatgacgtcccgtgaaaacttagctgaatccagcctgatgcatggcttcgcacctattgattttgactatccaatgcagcagaacgtcgaatattgtggcacccatgaaatctcataccaaaatgtaggactggtgattggcattaccggtgtggtgggaaattcactggcagaaaccctgagcagtactgatacgcccgggggcccgtggaaggtgtatggcgtgtcccggcgcggcaaaccggtctgttcaattgcaaaggttcgctatattcagtgtgatgtgagcgtcagcacagacgtccagagcaaattgagcacattaaaagatgtcacacacattttctgggttacgtccgcgtttgatctttcgaccgccaaatgctgcgaaatcaatggcgcgatgttccgcaacgtgctgaacgccgttattccgaatgcgccgaatgtgtgccatatttgtctgcagaccggtgccatgcattacatggagattcagcgcagcattgatggcaaactgcacgtgatcagccatgatcctccctttaccgaagatatggaacgcctggagaacatccacaatttctattacaccttagaagacgtgctttttgatgaagtttcacgcaaaccaagcctgacgtggagcattcatcgcccggatttaatcttcggcttttctcatcactccatgctcaacatcgtgggtacgctgtgtgtctatgcgacgatttgcaagcacgagtgtattccgctaatttttccaggaacgaaagcggtgtgggattcttatagcaacgcaagcgatgcgaatctggtggcggaacatcagatatgggctgccctgggcgcgcaagggaaaaataaagcattcaatatcacgaatggcgacgtgtttaaatggaaacaactctggaaagtgcttgccgaacagattggcgtggaatatgtgggctttgatgaaaccgaaaagattatcagcctgagtgaaatgatgaaagataagggtaccgtatgggagaaaatcgtccgcgacaacaacctgatttcgacgaccctgcaagaagtgggactgtgggattttgcagacatgctgctggctggcggtacctctcgtctttgtagcattaaccgaagtaaagaacatggctttttcggcttccgcaactcgatcaacagcttcatcttctggatccaaaaagccaaagataatcgcctcattccc

SEQ ID NO: 1191 - DNA, 1170 bp, Medicago truncatula
atgaactggtggctggcacgcgcgacgggtgatcaccctggcaagattactaaattcaaagaagctccgcgcaatgtccagaacgttgctcttatcattggtgtcaccggcatcgtcggcaattcgcttgccgaaattcttcctctgaaagatacgcctgttggcccttggaaagtgtacggtgttgcccgccgcccgcgtcctatgtggaacgtagataatccggtccattatattcaatgtgacgtttccaaccagaatgatgtggaattaaaactctcgccgctgactgatgttacacacatcttttacgtgtcttggacctctcgccccaccgaagcccagaattgcgaggtgaacggggcgatgctccgtaacgtcctccaagcattaatcccaaatgcgccaaatctgagtcatgtcagcctgcagactggggctaaacactacgtgggcccgtttgaaatcataggcaaaataaaaccacacgaaagtccattcacggaagatgttccgcgcctggataccccgaacttttattataccttagaggatattctgtttgaagaagtaggcaaaaaaaaaggtacaacgtggttcattaatcgcccgcaagttattttcggcttctccccgtattccatgatgaatctgattgggacgctgtgcgtatatgcggcaatctgcaaacacgaagggcttcctctgcgttttccgggatcaaagggcgcgtgggaatgctattccaccgcctctgatgcgaaccttatttccgaacaacacatctggggcgccgtcgacccgaacgcaaaaaatgaagctttcaattgcagcaacggcgacgtgttccgttggaaacatctttggaaagtattggccgagcggtttgaaatcgacgactatggctttgaagaaggtagcgagctgcgcctgagcgatctcatgaaagacaaaggcggtgtgtgggaagagatcgtccgtgagaacgaactgttatacaccaaactggaagaagtgggtgactggtggtttgcggacttcatgtttcgtgtggaaggcgtcctggatagtatgaataaatccaaagaacacggctttctgggctttcgcaactctaaaaactcgtttatctcttggatcgataaaaccaaggcgtacaagattgtgcct

SEQ ID NO: 1192 - DNA, 1185 bp, Nicotiana sylvestris
atgaattggtggtggagccgctctaccaataccacccagcagaacgttgactattatgagacaactaatcacgagagcaaccaaaatgttggtctggtcataggcgtaacgggtgtagtcggcaacagtctggcagaaactctcagttcgaccgatagtcgcgggggcccatggaaagtatacggggtcgcccggcgcgaaacgccggttcgtaacgccaaggtaacatatatccaatgcgatgtctcagtggcgaccgacactcaggcgaaactgagtacgctggaagacgtaacccacatcttttgggttaccagcgcgttcgatctgtcgatggccaagcactgtgaaataaatgcgaccatgctgcataacgtgctgaacgccatcatttctaatgcgcctaacctccgccatatctgcctgcaaacgggcgccatgcattatatgggcatccatcgtagcgttgacggcaagattcataccattagccatgatccaccgttcaccgaagaaatggaacgcctggaaaacattcacaatttctattatacgttggaagacgtgcttctggacgagatcagtcgcaagccgtcaatcacctggagtgtgcaccgtccggatctgatctttggattcagtcctcacagcacccttaatatagttggtacactgtgcgtatacgcgacaatctgtaaatatgaacgtgtaccgctgaccttcccgggtaccaaagtcagatgggactcatatagcaatgcgtcggatgcagacttggtagcagagcaccagatttgggcggcgctgtgcccccgcgcccagaataaagcgtttaacattaccaatggcgatgtgttcaagtggaagcatctgtggaaggtgcttgccgagcaaattggagtggaatatgtgggatttaacgaaaccgaaaaacacatttgcctagccgaaatgatgaaagataaaggacatgtctgggacaaaattgtgcgtgacaataacctggtttctaccaccctggaggaagtaggtttatggcagtttgcagatatgatcctggcaggtggttcgaatcgtctgagctcgatcaatcggagcaaagagcatggtttcatgggctttcgtaactcaaccaatagcttcatcttctggattcaaaaagcgaaagacaaccgtttaattcca

SEQ ID NO: 1193 - DNA, 1098 bp, Oryza sativa
atgccgccaatgtccatgagctggtggtgggctggcgcaattggcgccgcgcgtaaacgtcacgacggtggcggaggcgaacaacagccgccgtttcgctctgtggcgcttgtagtcgggagcaccggcattgtggggaccagcttggtcgatattttacccctgccggatacccccggcgggccgtggaaagtgtacgccttgtctcgccgtccgcctccgccatggagtccgccgccgcccgcggctgtcactcacttgtgcgttgatttagcggatgcggccgccgtagcggaagcacttgcaccgcttactgacattacgcacaccggcagcaaacactatattggcccgccggaatctattggcaaactgccggtagaaaccccgttcagcgaagatatgccgcgtcatgattacccgaatttctactacgatcaggaagacgtgctgttcgacgccgttacgtcaagctccagcagctccagttctcgccgcgcagcggccgtgacgtggagcgtgcaccgacctagcttgatattcggtttctcgccgcgttcagcgatgaacgtagtatgctccctgtgtgtgtatgccgccatttgccgtaaagagcgtcgagagctgcgttggccgggtagtttaggcgcatgggaaggcttcagcaacgcgtccgatgctgatctggttgccgaacaacagatctgggcggcagtggcggacgccgccgcgaagaatgaagcattcaattgctcgaatggcgatatttataaatggaaacagctatggccggttttagccgggaaatttggcgtcgaatgggccggctacgagggagaagagcgccgtgtgggcttgacggcagcaatggccgggaaagaagcagtgtgggcggagattgtggccgaagaaaaactggtggccaccgaactgggtgaagtggcgaactggtggtttgtagacgcactctttatggacaaatgggagtttgttgacaccatgaataaatcgaaggaacacggctttctgggcttccggaatacgctgcgctcgtttgaggcgtggattgacaaaatgaaactttatcgtatcgtgccc

SEQ ID NO: 1194 - DNA, 1230 bp, Oryza sativa
atgccgcccatgagcatgtcttggtggtgggccggggctatcggcgcggcgcgcaagcgccacgacggcggagggggcgaacagcaacctccttttcggtcagttgcactggttgtgggctcaaccggcattgtggggacgagcctagtggatattctaccgttaccagacacaccaggaggcccatggaaagtgtatgccctctcacgtcgtccgccaccgccgtggagtccgccccctccggcagccgtgacccatctctgtgttgacttagcggatgccgccgcggtggcggaagcgctggcaccgttaaccgatattacgcatgtgttttacgtcgccctagcggcgccgcatctggcggaagcacgaagtcgcgaggccaatgccggtatgctgcgcaatgtgctggcggcggtggtcccgacctgccccgctctagcgcatgtggcactgcagactggctcgaagcattacattggcccgccagaatcgatcgggaaactcccggtcgagaccccgtttagcgaggacatgccgcgccatgattatccaaatttctattatgatcaggaggatgtgctgttcgatgcggttacgagttcgagctcctcgtctagctcacgacgcgccgccgcggtgacatggtctgtacatcgcccgagcctcattttcggcttttcccctcgttctgcgatgaacgtggtttgcagcctctgcgtctacgctgccatttgccgcaaagaacgacgtgaactgcgctggcctggatcgcttggggcatgggagggctttagtaatgcgtcggacgcggacctagtggccgaacagcagatctgggcagcggtagcggatgcggccgcgaaaaatgaggcgttcaactgtagcaatggcgacatctataaatggaagcaactgtggccggtcctggctggaaaatttggcgtcgaatgggccggctatgaaggcgaagagcgccgtgttggcctgacggcggcaatggcgggcaaagaagccgtctgggccgaaattgtggcggaggaaaagttggtggctaccgaattaggcgaagttgcaaattggtggtttgtggacgcgcttttcatggacaaatgggagtttgttgacaccatgaataagtccaaggaacacggctttctgggctttcgcaacaccctgcggtcttttgaggcctggattgataaaatgaagctgtatcgcatagttccg

SEQ ID NO: 1195 - DNA, 1137 bp, Cynara cardunculus
atgcgtaaacttgaagacgggaacccgagtcgaaagtatcagaaattcgcgctgataattggcgtgactggcatcgttgggaatagcctagcggaaatcctgccgctgcacgataccccggaaggtccatggaaggtatatggcgtcgcccgtcgcccgcgtccttcgtggaacgatgactatcctattgattatattcagtgcgacgtttcagatccagagcagacccagagtaaactgagcactctcaccgatctgacgcatctattttatgttacctgggccaactgtgagaccgaatccgagaattgcgatatcaacgggaaaatgttcactaatgttctgaatgcggtaatccccaacgctcccaatctgcagcacatttgtttgcagaccgggcgcaaacattatattggcagtttggaggcgattatggccaaaaagttcgtccacgatccgcccttccatgaagacctgcctcggttggatagcccgaacttttattacaccctggaagatattctcttcaaagaagtagaaaaaaaagaagggctgacctggtcaattcatcgtcctggcgtgatctttggctttagcccgaactcgatgatgaacattttacttggtctatgcgcgtacgccagcatctgcaagcacgagggtcaaccgctgaccttcccgggaacgaaagaagcgtggaattcttttaccgatgcgagtgatgccgatctaattgccgaacatcagatttgggccgccgttgatccaatcgcgaaaaacgaggcgtttaacataagtaacggcgacgtgtttaaatggaaacacctatggaagatcctggcggagcagtttgaagttgaaaacgggggattccgagaagatggcgaaaagaaaagcctgggtgagatgatgaaagacaaaggtggagtctgggacgaaatcgttaaagagaaaggtctgctggttaacaaacttgaggaggtcggcaaatggtggttcgtggatgttgtgctgtccaacgaagggatgctagacatcatgaacaaatccaaagagcatggatttctgggattccgaaataccaagagttgtttcgtgtcatggatcgataaaattaaatgcagtaaaattgtcccg

SEQ ID NO: 1196 - DNA, 1173 bp, Ornithogalum longebracteatum
atgcgctggtggtgggcaggtgccataggagcggctaaacgttcgatggattccaccccgccgcagggccctacctatcagtcggtagcgttagtagttggcgcaaccggtatcgtgggttcgtcgttaattgacattcttcctctgagtgacacaccgggcggaccgtggaaactttatgccattagccgtcgtcccctggatagcagttcaccatctgtcgtacacgttcagtgcgacgtagcggatcctgatgaaacgttagcgatgttgtccccgctgtcggacgttacccacgttttttatgcagcctgggctcaccgcccgagcgaacatgataacattacggttaactctgcgatgcttcgtaatgtcctggccgcagttgttccgaatgccccgaatttacagcatgtgtgcctgcaaaccggcagaaagcattatgtcggctcttttgaatatctagggaagatccaggggcacgagccgcctttccatgaagacttgccgcgcttagacagcccaaacttctactataatcaagaagatatccttttcgaggaaagtgaaaaaaccgacggtcgcgtgtcctggtcggtccatcgtccaaccactatctttgggttttcggccatctcgaaaatgaacattatgcagtccctttgcatttatgcggctatatgtcgcaaagaacgtgcgctgctgcgctggcccggctcacgcgtgacgtgggaaggcttctctgatgcgtccgacgcggacttaatcgcggaacaccagatctgggcggccgttgatccttacgcgaagaatgaagcgtttaattgttcgaatggtgatgtttttaagtggaaacaactttggcgtactcttgcggaacaattcgaagtagggtttgtcggctatgaaggcgaagaaggccgatttagcctggaagaagcgatgcgcggaaaagaagaggtctgggcagaaatcgtacgtgaaagtgaactcgtcgaaactcgcctggaagatgtgggcaattggtggttcgtagacgctgttttaggtgttgaattcgaacatctcgatactatgaacaaatctaaagagcatggattcttgggtttccgcaataccatgaatagctttatttcttggattgataagatgcgagcgtttaaaatcgttccg

SEQ ID NO: 1197 - DNA, 1191 bp, Allium ursinum
atgcgttggtggtgggccggcgccattggggccgcgcgtaaaaccctcgactcaagcagcgcaagcaactcaaacacctccattccaccccctcaaagtatcgcgctcgtgattggcgctaccggaatcgtaggcaccagcttgctggacatcttgccgctggcagatactccgggcggcccgtggaagctgtatgcagtttcacggcgccccttagtatccgataacccgaaagttcatcccgttcagtgcgatatatctgacagtgcacagacattagaacgtcttagtccactgtcggatgtgacacacattttttatgtagcgctggcgcagtgccccacggaagccgagaacatcgccgccaactcggccatgctgcgtaatgtcctgaattcagttatcccaaacgccccgaatctgcagcatatctgcctgcagactggccgcaatcattattcgggcgcatttgaatttgcaggcaaagtgaagccacacgatccgcctttttatgaagagatgctgcgcttgaatagcccgaatttctactataatatggaggacattctcttggaagaagtggagaagcgcgacggcgtaagatgccacggctctgttcatcgtccgaccattatcttcggtttttcaacccgtgcggctatgaatattgtgcaaggggtgtgcgtgtacgccgcgatttgcaaaaatggtgggaaagcgttacgctggcctggaagccgcgttacgtgggaaggtttctcggatgcgtcagatgccgatctggtggccgagcaccagatttgggcggcggtcgacccgtacgcgaaagatgaagcgtttaactgcagcaatggcgacgttttcacgtggaagcagttgtggaaagcgctggcggaacagttcgagctcgaatgggtcggctatgagggcgaagataaatcatttagtttggaaaaagaaatgcgtggcaaggaagccgtgtggaaggaactggtgcgagaaaacgaactagtggataccaaattggaggaagtaggaaactggtggtttctggacctcgtactgggcgcggaaatcgaacatctggattcaatgaataaatcaaaggaacatggatttcttggttttcgtaatacgttaaatagcttcaactcatgggtcgataaaatgaaagccttcaagattgtgccg

SEQ ID NO: 1198 - DNA, 1194 bp, Convallaria majalis
atgcgatggtggtgggcaggcgcggtcggtgcggcccgtaaaaaaatcgatgacggccccccggcggcgccgaagtttcaaagcgtcggtctgatcataggtgatatcggcctagtaggtaactcattggcggaaattctgccgttaagtgatacgccggggggcccatggaaggtctacggtgtcagtcgtggcccgaagccgccaccgagcgacccgcctacgtttggcagctttgatcatgttgcctgcgatgtgtcaaacctggaccgcacgctggaaaagttgagcccgttggccgccgatgttactcatttattttacgtgggcgatgatgaagaatccgatccgaccgctaattcctcgatgtttcgcaatgtccttgaggcagtacttccgagtgcccctaacctgcagcatatttgtctgctgaccggattggaacattatctaggcccgctggaagcctgggggaaaatcccggcgcatgatccgccgtttcgtgaagatctgccacgtcttgatgcgcccaattactgctatgatttggaagatgtgctcttagagagcgtgaaagacgaatggggcggccggggcacgtggtttggccccccggcccctcctcatagcatcttcggcttctccaccaagtgcagtatgaacctaatcggcaccctatgtgtttatgcgtccatttgtcgcaaagagaaggtgcctatgcgctacggccctggcaaccgcgtccaatgggagggcttcagcgaagcctcagatgcagacttagtggctgaacatcagatttgggccgccgtcgatccgtacgctaaaaatgaagcgtttaactgcaacaacggcgatgttttcaaatggaaacatatgtggaaagtcttagcggaacagttcggcgtagagtttgtaggttatgaaggagaagatggcgaacgggcgcgcctggccgacgcaatgaaaggcaaggaggaagtgtgggaagaaattgtgcgggaaaacgaacttgttccgactaagttagaagttgtgggtaactgggaattcgtcgacacgatgctgaacgccgaggattcgtatctgtcatccatgaataaatcaaaagaacatggttttctgggctttaggaattcagtcagcagctttatcagctggattgacaaggcgaaagcgttcaaaattgtgccg

SEQ ID NO: 1199 - DNA, 1173 bp, Populus trichocarpa
atgtcctgctggtgggcaggcgcgttggggaataatcgtaaaaaattctacgacgacgatgaagcgtcgcgtgactataaatcggtagccttggttgtaggggtgaccggcatcgttggcaactcgctggcggaaattctgccattagcggatacaccaggtggcccatggaaagtgtatggagtggcgcgtggaaaacgcccaaattggaatgaggataacccggtggagtacattcaatgtgatatcagtgaccgcaaccagacgcagtcaaaactgtctctgctgacagatgtgactcatatcttttatgtgacttgggcaaaccgagaaacggaatcggaaaattgcaaaatcaacggtttgatgttccgtaacgtactggaagccgttattttgaatgcccacaatttacgccacatctgtctgcagaccggcaccaaacattatgtaggtccgtttcaattcttcggcaagatcgaggctcatgatccaccctttaccgaagatctgccccgcctcgaatttccgaatttctactacaccttggaagatattctttttcaggaagtcgcgaaaaaagaaggcctgacctggtctgtgcaccgtccagataacatttttggtttttccccgcactcattgatgagtattgtgcgcacactttgcgtttacgcggcgatttgcaagcatgaaggcacactgatgcgctttcccggagtgaaagaagtgtggaactgttatgccattgcgagcgacgcagacctaattgcagagcatgaaatttgggcctgtgtggatccgtcagcaaaaaatgaggcctttaatatccacaacggtgacgtgttcaaatggaagcatctctggaaagtgctgggcgaacaattcggcctagaagaatatggtttcgtggaaactgaagaacgcatttccctggcggaaaccatgaaagaaaaaggcgcggtttgggaagaaatcgtgagagaaaatcagcttcttccgaccaaactggaagaagtcggcgcgtggtggttcgtcgatctgatctttggcggcgaagtgagcattccgagtatgaacaagagcaaagaacatggcttcttagggtttcgcaacagcaaaaagtcgttcatatcatggattgaaaaaatgaaagcttccaaagtggtcccg

SEQ ID NO: 1200 - DNA, 1224 bp, Sorghum bicolor
atgtcgctcccgccccatctacatttcgattttgatcaagagcttgaacacaaaatggagtgcgaaggcacgaaaaaagttgttctagttattggtagtaccggtatcgtgggctccgcattaattaaccttctcttgctggagaatccaaagaatccggtcggttcctgtaaaaaagtgtatgccctgagcagacgaccgatgccaccgtggtatatgactgcgagctcatcgagcttcagcagtaacaacgacccgatccctacggttatccatctccatgttgatttggcggatgacgcggcagttactaaagcgctggcgcccctcaccgacattacccacgttttttacgttacctgggcgccgcgtcatggctggagtaatacggaagctcataccgttaaccgtgcgatgctctcgtctgtcctctcggctgtaatcccgaacgctccagatctaaaacacgttgccttgcagtctggccgcaatcagagcgctgatccgttccagcctccggtgcgcggtgcgttcgctgaagatggttggttaggcccgttcagtgaagatttaccgcgcccggattatccagatcttgaggacgcgttaatcgatggcatagcctcgagagtgggtgatgtgacttggtcggtgcatcgtccggccacgattttaggattctcaccgcgttcaagccgaaatctagtcagctcgctgtgtgtctacgccgcaatctgctctaaagaaggcgccgtcctgcgttggccggggtcgttagtggcatgggagggcttctccgacgcatgcgatgcgtggcttattgcagtgcaggcaatttgggcggccatgatggcccgtccaaatgaggcatttaattgcgggaacggcgatgtgttcaagtggaagcagctatggcccattctggcgagttacttcggggtcccatgggcaggatacgaaggtgaggaccaacgatttaaactggaagaagcgatggtcggcaaggaaccggtatgggcagaaatcattaatgaaaacggcctggtagaaacggagttagatgacatcaccacctggtggttggtagacgcagttgtgaacgcggaaaaggaacatgtggagaccatgaacaagtcgaaagaatttggatttcatagtatttatgatacggtgcgttgctttgacacatgtatccgcaaaatgaaagcgagtcggattgtcccg

SEQ ID NO: 1201 - DNA, 1203 bp, Zea mays
atgagtctgagttggtggtggacccgcagtgttggagccgaccgtgaacgcaaagacgaattagccgcagttccggaacacagtttccaatccgtagcattagttgtcggaagcacaggcattgtgggtgcgagcctggttgatatcatcccgcgagcggatacgccaggcggcccgtggaaagtttacgctttgtctcgccgtccgcctccgccgtggagcttgccgtcatcatcttccttaacacatatcaacgtggatttgaccgattcggcgaccgttgctgaagccctcacccccctgactgacattacacatgttttttatgtcgcctggtctccccgtgcgaccgaagctgaaaaccgcgaagcgaacagtgcaatgttaaggaatgtgttaagcgttgtggtgccgaactgtccggctctggcgcatgtgagtctgcaaacaggtatcaaacactacctgggccccttcgaacttatcggtaaaattccaactccagacccgccgtacactgaagatgtcccgcgtctggattgccctaatttctactacgatcaggaagatgtgctattcgcggcggtatcacgacgaggtggagcagtgagctggtctgttcatcgtcctaacctgattctgggctttagccctcgctctttttttaacgttgtttgtagtctctgtgtatatgctagcatttgccgcaaagaaggtgtcgccctgcgttggccgggatgcctaggatcttgggaatcattttcaaatgcaagcgacgcggatttgatagccgaacagcacatctgggcggctgttgaccccatggcaaaaaaccaggcgttcaactgtaataacggcgatctttataattggaaaatgttgtggcctgttctggcggcgcgcttcgggctagaatggacgggttatgacggggaagaaaaacagtttaaagtgtcggaagccatggccgggaaggaagcggtgtgggcggagatcgtacgcgaaaacggtcttgtagaaacccgcctatacgatgtggcggattggtggttcattgacttcgttgtgtatgaacactcagcggattccaaactcctagacagtatgaataagtctaaggaacacggctttctgggctttcgggataccgtgaaatcgttcggcaaatggatcgataaaatgaaggcatacaaaattattccg

SEQ ID NO: 1202 - DNA, 1161 bp, Daucus carota
atgtcactgtggtggtctggtgcggtcgccgccgccaagaaacgtatgggccagttagagtatgcctcagccccttctcgctacaacagcgtggcgttagtagtgggtgtaacggggatcgttggtaatagccttgccgagatcttaccgctgtcagatactccgggtggtccgtggaaagtgtacggggtggcccgccgcccgcgcccgccgtggaaggtggacgaacgggtggattacatccagtgtgacatctgcgacctggacgaaacgcgcctgaagttatcaatgctgcaagatattacacatgttttttatgtcacctgggccaatcgtcctaacgagagcgaaaactgcgaaatcaacggcaagatgctacgtaatgtcttaaatgcgctgattccgaatagtcccaacttgaaacatatttgcctgcagaccggtcgcaaacattatgtggcacctggctctgaagatcatgatccgccttataccgaggatctgccccgtttagactcaccgaacttttattatattctagaagatatccttttcgagcaggtggggaaaaaagaaggattgacttggtcagtccaccgcccggcgccaatctttgggttcagcccttactccctcatgaacatcataggcaccctgtgcgtatacgcgaccatttgcaaacatgaaggcgtgccgatgcgttttccgggtaccgaagaagcctggaactgttactcggatgcaagcgatgctgatttaatcgcggaacatcagatctgggcggcagtcgatccgtacgccaaaaatgaggcctttaactgtagcaatggcgatgtgttccgttggaaacatttttggaaagtgcttggtcagcaattcgaggtcgaatgcggctacttagaagctggcgagcgtcttagcctggcagaaatgatgaaagataagggaccagtttgggataaaattgtgaaggaaaagggcttagtacctactaaattggaagaagtcgcggcctggtggtttgcagacggcatgttctccggcccttgcccgcttattagcatgaataaaagcaaagaacacggtttctttggatttcgcaacagtaaatcttgctttatttattggatcgataaaatgcgtagttatcgtgtcgtcccc

SEQ ID NO: 1203 - DNA, 1191 bp, Nepeta cataria
atgtctatgaactggtggcgtgacggcgccgctaaaaaacgtatggacgagtcgtctgccgtgaaattacaacagcaacaatgcgtggcgctgatcgtgggcgtcaccggacttgtcggcaattcgttagcagaaatgttgccgctctcagacaccccaggaggtccttggaaagtgtacggtgtcgcacggcgcccgcgcccgtcttggaatgaagatcatcctatcaattatatttcgtgcgatgtgtctaatacggccgaagttgaggcgaaacttccccccctgagcgatgtaactcatattttttacgcgacctggacaagccgctcctcggaggaggaaaactgcgaagcgaacggcaaaatgctgaagaatgtgctggataccatgattccgaattgcccgaaccttaaacacatttgtttgcagactggccgcttccattacgtggcgtcggtggtggattggaaaattaacggtagccacgacaccccgctaaccgaagacttaccccgtcttaataccaacaacttctattacacacaagaagatatccttttagaagaagtaaaacgcaaagaagggttgacctggtcggtgcatcgccctggcacgatttttggctttagcccctacagcatgatgaacctggtaggtaccttatgcgtgtatgcagcgatctgcaagcaagaaggtgcggtgctgcgcttccccggttgtaagggcgcgtgggacggctatagtgactgcgcggacgcagatttgattgccgagcactatatatgggccgcgcttgatccccatgccaaaaatcagagctttaatgtgtcgaacggcgatgtttttaagtggaagcatctgtggaaagtattagctgaacagttcggcgtagagtgcgggggctacgaatatgaggaaggtcaacaagtacgcttacaggatgtgatgaaagataaaggccctgtgtgggataaaattgtacgcgaaaatggcctgagcaatactaagctggaagacgtggggaaatggtggttcagtgataccattctgtggaatgaatgccgtctggacagcatgaataaatcaaaggagcatggtttcctgggcttccgcaatagcaaaaattgcttcttgtactggattcacaaactaaaagcatataaaattgtgccatcgagcaccatttca

SEQ ID NO: 1204 - DNA, 1182 bp, Catharanthus roseus
atgtctatgcgctggtggtgggcaggcggcgcaataggtgccgcgaagaagaagctgcaggttgacgacggcccaccgaaacaccagagtgtagggctgatcctgggagtaacgggccttgtaggaaattcgctggcggaaatcctgccgttgagcgacactccgggcggcccgtggaaagtatacggtgttgcacggcgtagccgcccaacctggcatgcagaccatccaatagagtatatccaatgcgacttaagtaatccggaagaaacggagtctaaattatcgaatttaaccgacgtaacacatattttttacgtaacctgcgtaacagcaaacaaatataccgatgcagaaaactgcgatgcaaacggtaaaatgtttcgcaacgttttaaacgccatcatcccgaattgcccgaacttacaacatatctgcctgcagactgggctgaaacattattttggccgctcgctggttggcaactttgtgtgccacgagagcccttgttatgaagatctgccgcgtttggatgttcccaatttctattatacactcgaggatatcctctatgaagaagtgcaaaaaaaagaaggtctcacctggtccgtgcatcggccgggcaccatattcgtgttctctccattttcgtccatgaatctggttggcacgctgtgcgtttatgctgccatttgtaaacagcaaggtctgccgctgaaattcccagggagtaaaaatgtgtgggaaggctattcaatgtgctccgatgcggatcttgtggcggagcaacagatttgggccgccattgaccatttgcctaatgcgaaaaacgaggcctttaatgtatcaaacggcgatgtttttaagtggaaatacatttggaaagtgctggcggagcagtttggtttggaatttgtggaattcgacggcgagaaattatccttgcaggaaatgatgattgacaaaggtcctatttgggaggaaatcgtgcgtgaaaacggtctgttgggtacgaaactggaacaggttggcgtttggtggttcgcggacgtcctgctgggcttcgaatttccgcttgatagtatgaataaatcgaaggagcacggcttcctggggttccgcaatagcaaaaatagcttcctgtcttggatcgagaaaacgaaagcctataaaatcgtaccg

SEQ ID NO: 1205 - DNA, 1203 bp, Dichanthelium oligosanthes
atgagtatgtcttggtggtgggcaggagcgattggtgcggtttcgaaacgtcaggacgatcatgcagcggtgtctccgtcacagcacggcttccagagcgttgcagtggtggttggcagcaccggcatcgtgggaaccagcctggtggatattttacctctgccggatacccctggcggcccatggaaggtttacgccttatcacgccgccctctgcctccgtggagccttgcaagctcccctagctcagttacacatattcatgttgacctgaccgattcggcggcggcgacggaagccttgacccctcttaccgacattacccatgtgttctatgtggcgtggacctggagagcgactgaggaagaaaattgcgaagccaactctgccatgcttcgcaacgtgctgagcgtggtcgtgccgaattgtccaagcctggtgcacgtgaccctgcagacgggcactcgccactattttggccgctattctgaaaatccggttcacgataccccgtacaccgaagatatgccgcgtctcgacatgccagtgttttactacgatcaggaggatgttctctttgatgcggttgagcgcagaggtaaaacagttagctggtcggtccaccgcccgaacattatttttggcttcagcccgcgctgcgcgatcaatttggtgtgctcgctgtgcgtatatgcggctatttgccgcaaagaaggcgccccgctgcgttggcctgggagctgcggcggttgggagggattcataacaccgtcggatgccgacctcgttgctgaacaccacatttgggccggcgtggaaccgatggccaaaaacgaagcattcaactgttcgaacggtgatgtctgcacctggaaaaaactgtggccgatcctcgcgggccgctttggcctggaatgggccggctacgaaggtgaagaaaatcgtttcaaattgaccgaagcgatggcgggcaaagaagaactttgggccgaaattgtagaagaaaacgagcttgtcgcgacacatgttagcgaagttgcgaattggtgggttattgagacaagcgcggatcaatatggccttaattctccgatccttgattcgatgaacaaatcaaaagaacatggatttctgggattccggaacacgttcaagagttttaacgcgtgcattgatcgcctcaaggcccaccgcatcgtcccc

SEQ ID NO: 1206 - DNA, 1239 bp, Sorghum bicolor
atgtctatgtcatggtggtggcgcggcgcgattggtgcgacgcgtcgccgccaggatgaacacgctacagcgacgacggaacgccgaccctttcagtcagttgctttggtcgtgggctgcacgggtatcgtgggggcttcactcgtggatattcttccgttgcccgatactccgggtgggccttggaaagtctacgcgctgtctcgccgtccgcttccaccgtggtggcagtatcgccatccgcccagttcgtcgagcagcgtggtgactcatctgcaggttgatttgacggactccgcagcggtggcgaaaaccctgacacctttgaccgatattacacacgtattttacgcagcgctgagtgccccatccaccgtagatgaagccaaaaatcgtgaagcgaatagcgcgatgttacggagtgtactggccgcagtagtaccaaattgtccgcgcctgcgtcacgtctgccttcagacggggacgaagcattacatgggcccaccggcatcatttgggcgtcgtaccacggcgcacgaccctccgtacacggaggatatgccgcgactggattggccgaatttttattacgatcaggaagacgtgttgctggatgcagttgcggccggagcgggcgcagtaacctggtctgtccaccggcccagcctggtttttggatttagcccacgttctgccatgaatgttgtatgctcactctgtgtttatgcagcaatctgccgaaaggatggcgtgccactacagtggccgggcagcctgggcgcctgggagggcttcagcaacgcgtcagatgcggatctggtcgcggaacaacaggtctgggccgccgtagtggatcacccgatgggaatggcaaagaacgaagccttcaactgttcgaacggcgatgttttccgctggcgtcagctgtggcctattctggcaggtcgctttggcgtcgaatgggcgggttaccgcggcgaagaaaaccgcgtgaagttagttgacgcgatggccggcaaagagccggtatgggccgaaatagtggaagaatcccaacttgtcccgacgcagctgcacgaagtagcgaattggtggtttgtcgacgccttattttgcgcgaaatgggaatttctcgacagtatgaataaatctaaagaacacggttttctgggcttccgcaacactgccaagtcgtttgacaactggatcgataaaatgaaagcatgcaaaattgtcccc

SEQ ID NO: 1207 - DNA, 1140 bp, Tarenaya hassleriana
atgagccgccagatttaccataaaaatgttgcgcttataatcggtgttacggggctcgtgggcaattctctgagtgaaattctcttaaaaccggaaactaacggtggcccttggaaggtctatggcgtggcccgtcggccgcgtccgcggtggaattcagattgtcggattgaatatattcaatgtgacgttagtgacgcggagactacccgtcgcaaactgagctgtctgaccgatgtgacccacgtgttttacgtgacctgggctagccgtgaaacggaagcagaatgctgtgatgctaacgcagcaatgcttcgtcatgttctgacggcggtggcaccgtccttgcgccacgttgtacttcagacgggtaccaaacagtatgtagggccatatgaaagcttaggccgtattcggacgcatgaaccgccgtttagcgaagaccttcctcgcctgccgtatccgaacttttattatgcgcttgaagatgtgctctgtcaggaactggaaaaaacggaccagagcgtcagttggtcagtgcaccgcccgaatgtggtctttggcttctcaccatatagcctagcgaatatcgttttcagtttttgtatttatgctgccgtgtgcaaacatgaaggggtgcccatgtacttcccgttatcaaagaccacctgggagtgttacagcgttgcatcagacgcggacttgatcgccgagcaggaaatatgggccgcgatggaagcatcctgcaaaaacgaggctttcaattgcagcaatggagatgtgtttaagtggaaacaactttggggtatccttgctgagtcgttcggcatcgaagaatacggctttgaagaggggaaaaacctgggtctagttgagatgatgaaagacaaaggcaacgcctggcgtgaaattgtagagaagcatggtctggaagagacagagctagacgacggtatcgttggcagctggaaaatcgtagatgcggtcatggctgagggtggtcttctagattgtatgaaaggggatggtattttagattcaatgaacaagtctaaagaatttggatttctgagctttaggaactcaaagaagagttttgtccactggattagcaaatataaggaccataaaattgtacct

SEQ ID NO: 1208 - DNA, 1275 bp, Citrus sinensis
atgtctcgccgttggtgggcgggtgcggtggacgcgcctaaaaaacaaaaaccgaacctgagcagcatcttccaaaaccatcagaaaaagagctggagctggtcatggagctgggctagtgacatcggtgcgcccaagaaaaaactagacgaggataagcgcccacgtgattaccagctggtgggcctgattttaggtgtgacgggcatcgtaggtaacagcttagcggaaattttacctcgtagcgatacgccgggggggccgtggaaagtctatggcgttgcgcgccgcccacgtccggattggaacgcaaaccacccaattgaatatattcaatgtgatattagcgatcaagaagaaacgcaggccaaactgtccaaacttaccgacgtgacacacatcttttatgtgacctgggcgagccgccctactgaagttgagaactgtcagatcaatggttccatgtttcgcaacgtcctgcgctcaatcattcctaacgcaccgaatctgcgccatatttgcctccaaacaggcggaaaacactacttagggccgtttgactgtatcggtaaaattccgtacgatccgccgtttaccgaggacttaccccgtctgaacattccattattttattacaaccaggaggatatcctgttcgaagaggtggagaaacgcgaaggtttgacctggtcaattcaccgcccatttggtatcttcggtttctctccttactcgctgatgaatattattgcaaccctgtgtatgtacgcagccatctgcaagcatgaaggcattccgctgctgtttccaggtactaaagaaacatgggaggggttttcagaatatagtgacgcggatctgattgcggaacaacagatttgggcggctgttgacgcgaatgctcgaaatgaagcgtttaattgcactaatggtgatgtgttcaaatggaaacacctgtggaaagccctggcagaacagttcgagattgaaaattatggctttggcgatgaaaaagattcagaacgtatgcgcctgggcgaatttatgaaaggcaaagaaagcgtgtgggaagaaatcgtacgggagaaccagttgcagccgaccaaactgaacgaagttgccgtgtggagctatgccgacatgggcctgaacattggcgcgggatacctagtcagcatgaataaatcgaaagagcatggtttcctgggcttccgtaatagtaagaatagctttgtcacctggataggccgactgaaaagccatcggattgtacct

SEQ ID NO: 1209 - DNA, 1197 bp, Picea sitchensis
atgagtagttttagttggtgggcgggcagcctgggtcatggagtacgcaaatttgaaacgaaaggtgaatccagcgaggataaatctgaaaaacaacagggggttgccttggttattggcgtgacgggcatcgtgggtaactcgctagtggaaatcttaccgttaagcgataccccgggcggcccatggaaaatttacggcgtagcacgcaggccaaaaccggattggagcccggacaccccggtggaatacattcagtgcgacgtgctcgatcgcaagctaacgttagaaaaaattagccctctcaaagatgttacccacttattttgggtagtgtgggtgtcgcgggaaactgaagaacagaactgcgaagataacggtcgtatgctgagcaacgttttagatgccctcttgccaaacgcggagaatttgcagcacatttgcctgcagacaggcgcaaaacattacctgggaccgttcgatgcggtggcgcgtaatagatattttcagccgcatgaagccccataccatgaagaactgccccgtttgccggtaccgaacttttactatactttagaagacatcgtattcgaggcggccaaaaagaaagatggtctgacgtggtcgattcatcgcccatcatttatctttgggtttagtccatggagcctgatgaacattctgggtactctttgtgtgtacgcagcgatctgtaaacatgagggtctgccttttaaatatccaggtaatcgtattacctgggaacagtttgtggatattagcgatgcggaacttattgcagaacaggaaatttgggcagcgacctaccctcacgccaaaaaccaggcgtttaattgttcgaacggggacgttctgaaatggaaacgcctttggggcattattgcggaaaagttcgatctggagccgttaccttataaaggagaaggctttagccttgctgaagcaatgaaggataagggcccggtgtgggacgcgctggtacgcgaaaacaaactgcatccgacgaaaatagaggaagtggggaattggtggttcgcagattttacgctcaacctgcctcaggagacggtccatagtatgaacaaatcaaaggaatatggctttttcggctttcgaaacactgagacctcgcttggtcagtggatcgataagatgaaagcgagcaatgttgtcccg

SEQ ID NO: 1210 - DNA, 1017 bp, Cajanus cajan
atgagtgtgggtctggttattggggttaccggtattgtgggcaatagtttggccgaaattctgccgctggccgatacgccaggcggtccgtggaaagtttatggtgtggcacgccgcccgcggccgccgtggaatgcggatcatcctgtcgagtacatccagtgcgatgtctcggatccagcggatgcagacgctaaactggcggccctgtcagatgtaacccacgtgtttttcgtctcatggactaatagaccgactgagagcgaaaactcagaagttaacggtgccatgttacgaaacgtattgcgcgctgtcattccgaacgctcctaacttgcgtcatgttagcttacaaaccggcacaaagcactacctgggtccttttgaactgattggaaaaattgagtcgcatgagcctccattcactgaagatttgccgcgacttgacgcaccgaacttttactacacgcaggaagatattctgtttgatgaagtaagcaaaaaggagggcttgacatggagcgtgcaccgcccgcagaccattttcggttttagtccgtattcgcttatgaacgtggtgggaaccctgtgcgtgtatgcagctatttgtaaacatgagggtgtgccgctgcgttttccgggtacgcgtagcgcctgggaaggctacagctgctgttcggatgccgatctaatcgccgaacagcacatttgggcggcggtagacccttatgcacgtaacgaggcttttaactgtagcaatggtgatgtattccgctggaagcatctgtggaaagtactggccgaacagtttggtatcgaagatgaaaaccaattactgcccacaaacttagacgaagtaggcctgtggtggttcgttgacgttatttttagcgtcgagggaatgggactcttagacagcatgaacaaggcaaaagaacatggttttctgggcttccgcaacagcaaaaacagctttgtgtcttggattgacaaaacgaaagcatataaaattgtgccg

SEQ ID NO: 1211 - DNA, 1032 bp, Citrus clementina
atgtcatggttctgggctggtgctattggcgccgccaagaacgtcggcctggtgattggcgttactggcattgttggcaactctctggccgaaatcctgctgcgttcagataccccagtgggaccgtggaaagtttatggtgttgctcgccatcctcgcccgaactggaatgatgactatccggtggagtacattcagtgcgatgtctcagaccaagaggatacacaggcgaagctgagcaaacttacggatataacccacattttttacgtcacttgggccagccggcgtacggaagcagaaaactgccaaattaatggggccatgttccataacgttttaagctccgtgatcccgaacgccccgaacctgcgtcacatctgtctccagaccggcggcaaacactacgtaggccctttcgaatttgtcggaaaaattccgagtcacgatccaccctttaccgaagatctgccgcgtctcaacgtgactttattttactacacccttgaggatatcctgttcaaagagatagataaacgggagggtttaacttggtccgtccatcgtccgcacggcatcttcggcttctcgccgtatagcctcatgaacattaccgccaccctttgcgttaaattctgggccgcggtagatccaaacgcgcgtaacgaagcgtttaactgcacgaatggggacgtgctgaaatggaagcacctgtggaaagtgctggccgagcagtttgaaattgagaattatggactggaagacggtaaatgtagcgaacgtgtacgcctggaggagatcatgaaaggtaaagagagcgtatgggaagagattgtccgcgaaaatcagctgcagcccactaaactcaacgaggtggcagtctggtcatatgccgacaccgtcatgaatgttggcgccggatacttggtttccatgaacaaatcgaaagagcatggctttcttggcttccgcaactcgattagcagctttgttacctggattggccggctgaaatcgcacaaaatcgtaccg

SEQ ID NO: 1212 - DNA, 1167 bp, Aquilegia coerulea
atgagctggcgctggtcaggcgcgaatggcgcggcgaaaaataaacttgaagaggatgaagttccgagtaactaccagtcagttggtttggtaattggtgtaactggcatcaccggcaactctttggcaaaaattttgccgctgagcgagacccctggagggccgtggaaggtgtacggagttgcccgtcgtccgcgtccgacctggaataccgagtatccgattgagtatatacagtgtgacattaccaacaaagacgaaacgctgctgaagctgtctagcttaacggatatcacccacattttctacgtagcatggaccccgtgccctacggacgccgaaaattgccaagtaaacagcaaaatgctgcgcaatgtgttgcaggcagtagtcccgaatgcgcctaacctgaaacatatctgcctccagacgggcatcaaacactatacgggcgactttgaatcctttgggaaaaacctcgcgcacgatgctccgttttgcgaggacctcccgcgtctggacaccccgaacttctattatacccaggaggatatcctgttcgaagaaattgataataaagaaggtctcacctggtcaattcaccgaccagcactgatcttcggcttttctccgtacagcttgatgaacgttattggtaccctgtgtgtatatgcagcgatctgcaaacacgaaggcaagaaattacagtttcctggtccccgtgcagcgttcgagggttatttcgatgcatcggatgcggacctcattgcggaacatcagatttgggcaagcgtggcagatcaacatgccaaaaacgaggcctttaactgcacgaacggtgatgtttttcaatggaaacacctgtggaaggtgctgggcgaacagtttggcatcgaatgtgccgaattcgaagagggcgtgagtttgcaggaactgatgaaggacaaaggcccggtatgggatgaaattgtgaaagaaaacaaactctgtccaaccaaattggaagaggtgggtgcatggtgggtcgtagatacctttttcagctggaaagaattgggccttagcagcatgaacaagtcgaaagaacacggtttttttggttttcgaaactctaccacttcgttcattagctggattgacaaaatgaaggtttacaagatagtgccg

SEQ ID NO: 1213 - DNA, 1164 bp, Lonicera japonica
atgtcctggtggtgtaaatggagtattggcgccggcaagaacctgccgaaccagaacaaagaaaacggcgtatgtaaatcctataagagtgtggccctggtggtgggtgtaactggcattgtaggaagctcactggcggaagtgttgaagttaccggacacacccggtggtccatggaaagtttatggtgtggcccgacggccgtgcccggtctggcttgccaagaaaccggtggagtatatacagtgcgacgtgagcaataaccaagaaacaattagcaagttatcaccgttaaaagatatcacccatatattctacgtttcgtggataggcagcgaggattgccagacgaacgccactatgttcaaaaatatcctaaacagtgtaatccccaatgcttcaaatctgcaacatgtttgtcttcagacgggtatcaaacactactttgggatcttcgaggaaggaagcaaagtcgtaccccatgactcgcctttcaccgaagatctgccgcgtttgaatgtccagaacttctatcatgatttagaagacattctttacgaggaaaccggcaaaaataatctgacctggtcagtgcatcgtccggcacttgtgttcggctttagcccgtgttccatgatgaatatcgtgtctacactgtgtgtgtacgcaactatctgcaaacacgaaaataaggccctggtttacccgggatcgaaaaactcgtggaattgctacgccgatgcggtggacgctgacctggtagcggaacatgagatttgggctgccgttgacccgaaggcaaaaaatcaagtgctgaactgtaataacggcgacgtatttaaatggaagcacatttggaaaaaactcgccgaagaattcggcattgaaatggtgggctacgtggaaggcaaagagcaggtttccctcgcggaattaatgaaagacaaagatcaggtgtgggatgaaatagtgaaaaaaaacaacttagtaccaacgaagctgaaagagattgcggctttctggtttgcggacatcgcgttttgctcggaaaatctcatttcctccatgaataaaagcaaagaattgggctttctgggttttcgtaactcaatgaaaagctttgtctcgtgcatcgataaaatgcgtgattatcgtttcattctg

SEQ ID NO: 1214 - DNA, 1176 bp, Olea europaea
atgagttggtggtttaatcgctcggtcaatggatgcaaacagaaaaaaattcaggagaacggagttcaacaacagcaaaatggcgatattcagagcttcaaaagtgttgccctgatcgtaggtgtaaccggcattgtggggagttcgctgtctgaaatcttacagtataccgacacaccagggggtccctggaaagtgtacggcgtggcccgtcgaccgcgcccaacgtggttggccaaatctcatgtagagtacgttcaatgcgacgtgaccaacactgaagaaaccatttccaaaattagtcccttaaccgatattacccacatcttctatgtgtcttggatgggcaacgaggattgcagcatgaatgcggtaatgtttcaaaatattcttaacagtgtaattccgaacgccccaaacctgcagcatatatgtctgcagacaggctcaaaacattatattggcctgtttgaaacggatacgcctgagtcgcacgacactccgtattcggaagatctggcccgtttaaaacagccgaacttttaccataatcttgaggacatcctattcgaagaaacggctaagaaaggtttaacgtggtcggtgcatcgcccagcactaatttttggtttttcgccgtgtagtcttatgaacattgtctcgaccctgtcagtctacgcggccatctgcaaacatgaaaataagccgctggtttatcctggcagcaaagccagctggaactgcttcgtggatgccgcggatgcagaactggccgcagaacaccaaatctgggccgcagttgatccgaacgccaaaaaccaggcatttaactgtaccaacggggatctgttcaaatggaaacatatttggaaggttctggcaaaccaatttgatcttgagatggtagggtacattgaaggtaatgaacaggtgtcgatggaggaactcatgaaagacaaagatagtgtgtgggatgaaattgtcaagaaaaataatttaatgccgaccaaactgaaagagattgctgccttttggttcgcagacatagccttttgtctggaaaatgttctgtcatcaacacacaaaaaccgactacacggtttcatgggcttccgcaatacttacactagctttgttagctgcattgacaaaatgcgagcctaccgtttcattccg

SEQ ID NO: 1215 - DNA, 1176 bp, Thlaspi densiflorum
atgagctggtggggcgccggtgccattggtgcggccaaaaaaaaattcgatgatgatgaaccgacacagagctacgaaagcgtcgcgcttatcattggtgtcaccggaattgtggggaactctctggcggaaatattgcctctgtcggataccccaggaggcccttggaaagtgtatggcgtcgctcgccgcccccgtcccagttggaatgccgaccatccgattgattatattcaatgcgatgtgtctgatgctgaagatgcacgttcaaagctttcaccgctgaccgatgttacccacgtcttttacgtaacctggacctcgagatcgtccgaatccgaaaactgtgaagcgaacggcagcatgctgcgtaatgtgctgggggcgatagtacccaatgctccgaacctgcgtcatgtgtgccttcaaacgggcacaaaacactatctgggcccattcgatagtgcgggggatgagagcgtccatcgtcacgaaagcccatttacggaagacatgccgcgtcttcagatcccaaatttttattacaccctggaggacatcctgtttgaagaaattaagaaaaaagaaggcgtaacctggtctattcaccgccccaatactattttcggctttagcccgtatagcctgatgaacattgtgggtactttgtgtgtgtatgccgccatatgcaaacacgagggcagccctctgctgtttccgggttcaaaaaaggcgtgggaaggttttactacggcctccgacgccgacctcgtagccgaacaacagatttgggccgctgttgatgagtttgcgaaagatcaagcgtttaactgcaataacgcggatatattcaaatggaagcatctgtggaaggtgctggccgaacaatttggcattgaagagtacggttttgaagaaggtaagaacgtaggcctggtggaaatgatgaaaggcaaagaacgcgtttgggaagaaatggtcaaagaaaaccagctgcaggagaaaaaactggaagaagtgggggtttggtggtttgcggatgttattctcggcgtggaaggcatgatcgattcaatgaacaagagcaaagaacacggcttcctagggtttcgtaactccaacaatagctttgtgagctggattgataaatacaaagcttttaaaattgtaccctta

SEQ ID NO: 1216 - DNA, 1170 bp, Stellaria media
atgtcgtggtggggcgccggtgcaataggcgcagcgaaaaaaaaaatcgatgaagatgatgatgaaccgcagagttaccagagcgtgggcctgattgttggcgtgacggggattgtagggaatagcctggcggaaatcctgccgctggcggacacgccgggcggcccctggaaggtttatggcgtggcccgacgccctcgcccagaatggaataccgatcaccccattcagtacatacagtgcgacgtctcagatccggatgacgcgctgagcaaactctcccctctgaccgacgttacccatattttctatgtcacctggacgactaagtcaagcgaaattgaaaattgtcgcgcgaacgtcagcatgctgcggaatgtattgcaagcggtgattcctaacgcgccgaacatccaacacgtatgcctgcaaactggggctaaacactacgttggtccgtttgacagttttggcaagatccaaccacatgaacctccgttcacggaagacatgccgcgcctgccggtaccgaatttctattacgacctcgaagatgccttatttgaagaggttcagaaaaaagaaggcgttacatggagtgtgcatcgccccacgaccatctttggctttagcccgtattcattaatgaacattgtgggttccttgtgtgtatatgctgcgatttgcaaatatgaaggcaagccgttggtctttccggggacgaaagcagcctgggaaggctttgcggtggcgagcgacgcggatcttatcgccgagcagcgcatttgggcgagcgtggatccttttgcgaaaaacgaagcatttaattgtaacaacggtgatgtgtttaaatggaaacacctctggaaatctcttgcggaacaattcggcattgaggactatgggttcgaggaaggaaaaaacgtgggcctgaaaactatgatggacggcaaacaatccgtttgggaagagattgtgcgcaaaaatcaactgcaggaaaccaaactggatgaagtcgggtcatggtggtttgttgacattattttgggcgtggaaggcgccttagattctatgaataaaagcaaggaacatggcttcgcgggattccgtaaccctaaaaacagttttgtgagctggatcgataaatgtaaggcgtttaagatcgtgcct

SEQ ID NO: 1217 - DNA, 1167 bp, Erysimum crepidifolium
atgtcatggtggggcgctggtgcaattggtgcggccaagaaaaagctggatgatgatgaaccgagccagtcttacgagagtgtggccctgattatcggtgtgacaggcattgtgggtaatagcctggccgagatacttccgctaagcgacacaccgggcggcccgtggaaagtttatggcgttgcccgccgcccacgtccgtcatggaacgcagaccacccgatcgactatattcagtgtgatgtgagcaacgccgaagatgcgcgctcaaaactgagtcctcttacggatgttacccatgttttctacgttacgtggacgaaacgggaatcggaatccgaaaactgcgaggcgaatggctcaatgcttcgaaacgtgctgcaggcgattgttcctcatgctcccaatctgcgtcatatttgtctgcagaccggtaccaagcactatttgggcccgttcagcaatctggatggtccgcgtcatgacccaccgttcaccgaagatatgccgcgtctgcagattcaaaatttctattatacccaagaagacattctttttgaggaaattaaaaagaaagaaatttcagtcacgtggagcattcatcggcccaacaccatttttggctttagtccgtactcccttatgaatattgtgggtacactatgcgtctatgccgcaatttgtaaacatgaaggatcaccgctgctgtttcctggtagtaaaaaggcctgggaaggttttaccacggcatctgatgcagatctcatcgctgagcagcagatttgggccgcagttgatccctatgccaaaaatgaggcctttaactgtaacaatgcggatattttcaagtggaaacatctgtggaaaattctggcagagcaatttgggattgaagaatatgggtttgaggaaggcaaaaacttgggattggtggaaatgatgaaaggcaaagagcgcgtatgggaagaaatggtaaaagaaaaccagcttcaggaaaaaaaactggaagaagttggcgtttggtggtttgcagacgtgatactgggcgtggaaggaatgattgacagcatgaacaaatcaaaagagcacgggttcctcggcttccgcaactctaataattcgttcatttcttggattgataaatataaagcattcaaaattgtacca

SEQ ID NO: 1218 - DNA, 1134 bp, Morus notabilis
atgtcatggtggctggccggcgcaattcgtgcggcgaagaaaaaacgcgaatatgactacgcgccgagtgagtaccagtctgtggcactggtagtaggtgtaactggtatcgtgggcaatagccttgcggagatccttcccctgtcggataccccaggaggtccctggaaaaatgcagaccatcctattacctacattcagtgtgatgtttcggatccgcaacagactaaagatcacttatcaaaactcactgatgtgacacacattttttacgttacctggagctctcagcccaccgaggccgagaactgctccgtgaacggcgcgatgctgggcaacgttctcgaagcggttatcccgcatgcacctaacctgcagcacatttgtttgcaaaccggtcgtaaacattatattgggccttttgagcttctggggaaggttgagcctcacgaaccgcccttccatgaggatttgccccgcctcgatgcgccgaacttttactacgtacaggaggatatcttggtagaagaggtaaaaaaaaaagagggcctgacctggtcggttcaccgcccgggcgttattttcgggttcagcccgtcaagtctcatgaatatcattggcagtctgtgcgtgtacgcggccatttgcaagcatgaagggatgaaacttcgtatccccgggacccgtgaaggccgcgaggcatacctggatgcatccgatgcagacttgattgcggagcaccagatctgggcggcggtagatacatatgccaaaaacgaagcctttaattgtagcaacggcgatgtattcaagtggaaacatatgtggaaggtcttgaccgagcagtttgaactggagtacgaagaatttgaagatgacggcgattcgctgaccctggttgaaatgatgaaagacaaaggggaagtttgggatcagattgtcaaagagaatgggcttgtgcccactaatctggaggaggtaggcaatttttggtttgccgacctggtgctaacactcggcacgaccctagacagcatgaacaaaagcaaagagtatggttttgttgggtttcgcaattcgaaaagcagctttatctcgtggattgataaaatgaaaagctataagatcgttccg

SEQ ID NO: 1219 - DNA, 1176 bp, Helianthus annuus
atgtcgtggtggctgagcggtgtagttggcgccaccaggcgcaaacgtggcgataccaatccaagcttaaaatataaaggcttcgcgctgatcgtgggtgtgacgggaatcgtgggcaactcactggccgaaattctcccactgcacgacacgcctggcggtccgtggaaagtttatggtgtggcgcgtcgaccgcggccgccttggaacgcggattaccctatggagtatatccagtgtgatattcgtgatgaagagcagactctgacccaactgtcaaatctccaggatctgacgcacgtgttctatgtgacatgggcaaattgttctaatgaacagcataactgtgaaattaatggtcagatgttcaaaaacgttctgaacgccgtgatccctaattgcccgaatttacaacatatttgtctccagacggggcgaaatcattatattggcccattcgatgattggggcaccttgaatggcgtgcaggacgcgccattctgcgaagatttacctcgcatcgagaatccgaacttctattatacgctcgaagatatactgtttaaagaggtgacgaagaaagaaggcctgacctggagtgtacatcgccctggtgtaatttttggcttctccccgtgctcgatgatgaatattgtagggtccctatgcgtttatgccgcaatctgccgacatgaaggtgaacccctccgcttcccagggacacgccaggcatgggaaagctaccattcagcatcagacgccgatctgattgcggaacatcacatttgggcggccgtagatgaatatgcaaaaaacgaagtctttaatatatccaacggggatgtttttaaatggaaacatttctggaaagtgctggcggaacagttcggcgtagaaaatggtggtctgcaagaagaaggcgaacgccgtagtttatcagacatgatgaaagataaaggcgctgtttgggacgccattgtgactgagaaagaattactgccgaccaaacttgaagaggtgggcggctggtggtttgtcgatgtagtgctgggaaacgaggggatgttggatcttatgaataaatcaaaagaacatggcttcctgggtttccgcaactccaaaagctcgttcgttagctggattgacaaaattaaatgctcaaaaattgtaccaatc

SEQ ID NO: 1220 - DNA, 969 bp, Capsicum annuum
atgagctggtggcgagcgggcgcgaatggcgcggcaaaaaaaaaatttaaagaagatgacgcccctgcgaaatatgaaagcgttgcgctgattataggagttactagcattgtaggcaattccctggcgaaaattttgccgctggcggataccccgtcgggcccgtggaaggtgtatggcgtggcacatcgcagccgctcaagctggaacgccgatcactccatagagtatgtgcagtgtgatatttccaacccagaaggccatgacagtccgttccatgaagatctgccgcgcctggtggaaccgaacttttattacgttctcgaggacattttatttaaagcggtagagaaaaaagagggtctcacctggtcggtgcatcgtccaggaacgatattcggatttagcccgtattgtcttatgaacattgtcggcaccctgtgtgtatatgcggtgatctgcaagcatgaagggctaccgctgaaattcccgggtgtgaaagaggcctgggatgtgtattcggattgcagcgacgcggatcttatcgcggcccatcagatttggccggctgttgatccatacgcgaaaaacgaagccttcagtgtcagtaacggagatttttttaaatggaagcacttctggaaggttctcgcagaacaattcggcgtagagccagcagaatgttacgaggggaaacgttgcacgctgactaaaatgatgaaagataaaggtacggtttgggatgaaatcatgaaagaaaatggtctggtgccgatcaaactcgaggaagtaggtgtctggtggtttgtggacctgatgttagcgggtgattgcccgctggacaccatgaataaatccaaagagcacgcgatttttgcggtgcacatggcgcttaaatcgattattgataaaattacgatcgatacgccggattggacatgtaaagttcagatcgttgaaagccttacc

SEQ ID NO: 1221 - DNA, 1221 bp, Macleaya cordata
atgtcgtggtggtgggcaggagcgattggggcggccaaagcaaaattccttataccgaacctgagcctgagcctgctgcttttttgcttctttaagaaatttgaagaagatgaggtcccgccgaagtaccagtcggtcggtctgattatcggcgtgacaggcatcgtcggtaatagcctggcggagatcttgcctctgagcgacacgccgggcggaccgtggaaagtctatggcgttgcacgtcgcccgcgccccccatggaatgcagaccatccgatcgagtacatccagtgcgatgtctcggactccgatgaaaccctgtcgaaactgtctccgctcaccgatgtgactcatatattttatgttacttggacgagcaggaaaaccgaaagcgagaactgtgaagcaaatggcgctatgtttcgtaacgttctgcgagcgctgattccgaatgcaccgaatctgcagcatatttgtctccaaaccggtcgcaaacattatctggggccattcgaaaaattgggcgaagaaattgagcatcaggttctgccgcttcatgaagatttaccgcggttgaagactccgaatttttattacaccctggaagacattctgtttgaagaagtcgagaagaaagatggactgacctggtccgtgcatcgaccgggcacaatctttggatttagcccgtattcggtgatgaatctaattggcaccctgtgcgtttacgcggctatctgtaaacacgaaggcacaccgttgcgcttcccgggtacgcgcgtggcctgggaaggctattccgacgcgtcggatgcagatttaattgcagagcatcagatctggacctcggttgacccgtacgccaaaaacgaggcgtttaactgtagtaacggcgatgtattcaaatggaaacacttgtggaaagtcttaggtgaacagtttgaggtcgaatgcgcggaatttgaagaaggcttaaaattgggcgaaatgatgaaagacaaaggcccggtatgggacgagatcgtgaaacagaatgatctgtgcccgaccaagttggaagaggtgggtgcctggtggtttgtcgataccatgtttggggcgaaggaaagcatcctcgattccatgaataaaagcaaggaacatggctttctcggctttcgcaactccaattcagcatttgtgagctggatcgataagatgaaagcattcaagatcgtgccg

SEQ ID NO: 1222 - DNA, 1164 bp, Citrus clementina
atgagttggtggtgggccggagctattggtgccgcgaaagccaaatcatattccaagttcatcaataaactggaagaatatgaacaaacccgcgactaccagtctgtgggactggttgtcggggttaccggtattgtcggcaacagtcttgcagaaatcttgccccgtcccgataccccgggcgggccctggaaagtctatggtgttgcacgccgtccgcgcccaaattggaacgcggcgtatcccgttgaatatcttcagtgcgacgtgtcagatcaggaagatacccaggcaaaattgtctaagcttacggatgtgacgcacattttctatgtgacttgggacggccggcgtaccgaggctgaaaattgccaaattaacggtgcgatgcttcataatgtgctgcggtcagtgatcccgaacgctccgaacctgcgccatatttgcttgcaaacgggaggcaaatactacatgggtccgctggaattcattggtaaaattccgtcgcacgatcctccgtttacagaagacctgccttcgctgaatattagcctgttctactacaccctggaagatattctcttcgaagaagttgataaacgggaaggcagcacctggtcggttcaccgcacattcggaatattcggcttcctctcgtttggcgtgctgatgaatattattgcaaccctttgtgtatacgcggccatttgcaaccatgagggcgttccgcttttgttttacggtacgattgatacctgggaagggttccagcaagtctctgatgccgaattgattgcggaacagcagatttgggccgccctggatagtaatgcacgcaatgaggactttaattgcactaatggcgattttgaaatcgaggattatggattagaagacggaaagggctgtgaacgtgtacgcttggaagaaattatgaagggcaaagagagtgtctgggaggagatcgtgcgcgagaaccagctgcagcctacgaaactgaacgaagtggccgtgtggtcgttcgccgatacggtgatgaacatgggggccggttacctggtgtcagtgaacaaaagcaaggaacacggttttctcggtcaccgaaatagcaaaaattcttttgtgacgtggagcggtcgtctgaaaagccaccgtattgtgccg

SEQ ID NO: 1223 - DNA, 1176 bp, Arachis ipaensis
atgtcgtggtggtgggctggtgccatcggtgctgccaaagccaccaagaaattcgaagacgatgagccgcctcggagctttcagtcagtagggttgatcataggagtaacgggaatcgtggggaactcactggccgagattcttccgctggccgacacacctggaggcccgtggaaggtttacggggtagcgcgacgtccccgacctagctggaatgtggaccacccgatcgaatatattcagtgcgatatctcggaccccaatgatacccagtctaaattaagcgcgcttactgacgtcacgcatattttctatgtttcgtggactcgccgccctactgaagcggaaaactgtcaagtgaatggcgcgatgctgcgcaatgttctgcaagccgtgatcccgaatgccccgaacctccgtcatgtgtccctgcagacgggtggtaagcattatttaggaccttttgaactgttcggcaaaattcagccgcacgagccgccgttcaccgaagatttaccacgcctgaaagcaccgaatttttattatacccaagaagatattctatacgaagaaacgcaaacaaaagacggcgtgtcgtggtctgttcatcgcccgcaggtcattttcggcttctccccttattccctgatgaacatggtaggaaccctgtgcgtttatgcggcaatctgtaaacacgaacgcgtccctctgcgctttccgggcaccaagtcggcgtgggaagattacaccactgcaagcgacgcagacctgattgccgagcagcacatctgggcagctgtggatgcgtatgcgcgtaacgaggcatttaactgcagcaatggggatgtgttcaaatggaaacacctctggaaagtgctggccgaacaatatggtattactgaatatggtttcgatgaaggtagcgaacgtttgaaattgagcgagatgatgcgcgataaaggtcctgtatgggatgaaatcgtgcgtgaaaaccagctgagcccgacgaaactggaggaggtggcggattggtggtttgttgatgtaatgttcggcggcgccggcttactcgatagcatgaacaagtcgaaagagcatggctttctgggttttcggaattccaaaaactcctttataagctggatcgataaaactcgagcatttaaaattgttccg

SEQ ID NO: 1224 - DNA, 1173 bp, Vitis vinifera
atgagttggtggtgggccggggcaattggtgctgccaaaaaaaaatttgatgaggatgatgcgccccgggggttccagaatgtaggactggttattggcgtaacgggaatcgtgggcgatagcctagccgaaatcctcccgttatcggataccccaggcggcccctggaaggtatatggcgtcgcgagacggccccgaccggactggaatgcggatcaccccgtggaatacacccagtgtgatataagtgattcagaggatgctctcgcgaagctgagtccgctgacggatgtaacacatgtgttctacgtcacttggacaaaccgcgccacggagattgaaaactgcgaagcgaacggcacgatgctacgcaatgttcttcgcgcgttaatcccaaacgcaccgaacttacgtcacatctgcctccagacagggggtaaacattatatcggtccttttgaagcatttggaaagatcaaaccgcatgacccgccttatcacgaagacttaccgcgcctggacgccccgaatttttactatactctggaagatattctgtttgaagagtgcgagaaaaaagacgatctcacctggtcggttcatcgcccagtgattatttttggtttctctccatattctatgatgaacatcctgggtaccctgtgcatatacgcggccatttgcaaacacgaaggtattccactgaaattccctggcagcaaagccgcgtgggactgttactcggacgcgagcgatgcggacctcatcgctgagcagcaaatctgggcaacggttgatccgtacgcgcgtaacgaggccttcaatattactaatggcgatttatttaaatggaaacacctgtggaaagttctggccgagcaatttgacatggagtacgccgaattcgaagaaggcgaagagaaacagtcgatggtagagatgatgaaagataaaggcccggtttgggaagaaattgtacgggagaaagagttacttccaaccaaactggaagatgtggcgcagtggtggttcattgacttagtactgggcggcgaaagtctcttaaactgcatgaacaaaagcaaagaacatggatttttaggtttccgcaattcgcgtaattcattcgtttggtggatcgacaaaatgcgcgggcacaaactgatcccgcct

SEQ ID NO: 1225 - DNA, 1170 bp, Hevea brasiliensis
atgagttggtggtgggcgggggctattggcgccgccaaaaagaaatttgatgaagatgacgcgccgcgctcatttcagtcagtcggtctcgtcctgggtgtaacaggtattgtgggcaattcactagccgaaattctgccattatctgatacgccgggtggcccctggaaggtatacggtgtggcgcgtaggccacgccccaactggaacgcggaccatccagttgaatatgtacagtgtgatatctctgatcaagccgagacgcaggccaaactgtcccaactgaccgacgtgacccatattttttatgtaagctgggctaataggagttcggaagccgaaaactgtgaaattaatggcagtatgttacgaaacgtgctccaggcagtgatcccgaacgctccaaatctcggccacatttgtctgcagaccggcaccaaacattacgtgggcccttttgaactgttcggtaaaattcagccacatgatccgcctttcaccgaagatctgcctcgtctgaacgtgccaaacttttattatactctggaagatattctgtttgaggaggccgcaaaaaaagaaggtcttacttggagcatttcgcggccggatcagattttcggcttttccccgtactccctaatgaacattataggcactttgtgcgtctatgcggtgatctgcaaacacgaaggcctgccgttactttttccgggaacaaaacaggcctggaattgttactcaattgcctcagatgccgacctgattgcagagcaacacatctgggcctcagtcgatccgtacgcccgcaatgaagccttcaactgcaacaatggagacgtgtttaaatggaagcatttctggaagatcttagccgaagaattcggcatcgaaaaatatggttttgaagaaggtgaaaagaggctgagtctggttgagattatgaaagataagggtccggtgtgggaagaaatcgttcgcgaataccagctgcaccccaccaagctcgaagaagtaggtgtctggtggtttgccgatctgattcttgggggcgaagctgtgattagtagcatgaataaatcgaaggaacacggctttttggggttccgcaattctaaaaattcctttatctactggattgacaaaatgaaggcctataaaattgtgccg

SEQ ID NO: 1226 - DNA, 1167 bp, Dorcoceras hygrometricum
atgtcctggtggtgggccggcgcgattggggcggccaaaaagaaatttgacgaggacgagaatcctgcaaagcatcaaagcgttgccttaattattggtgtaacgggcatcgtcggcaactcattggccgagattctgcctctgagtgacacgcctggtggtccgtggaaagtgtacggggtggcccgccgtccgcgcccggcatggaatgatgacaatccgacgaactacatacgctgtgacgtttcagacgcagatgatgtgcaggagaagctgggttcactgacggacatcacccatgtgttctatgtcacgtgggcgtcgttatccacggaggccgaaaactgcgaagttaacggccgtatgttgtccaacgttttagatgtggtcatcccgaattgtcctggtttgaagcacatttctctccaaaccggccggaaacactattttggccctgtggaatcatttggcaaaattgccatccacgatcctccttttgatgaaagcctgccgcgtcttgatcatataaacttctactacacgttggaggatatcttattcgccgtcgtgggcaaaaaggaaggtctgacgtggtccgtgcatcgcccgggcactatttttggcttttcaccctacagtctgatgaatttagtcggcaccctctgtgtatatgcggcgatttgcaaacatgaaggtatgcctctgcgttttcccggctcgaaaagcgcatgggacgggtatagcgattgctcagacgcggacttaatcgcagaacatcacatttgggcggccgtcgatccatacgcgaagaatgaagcgttcaacgtgagcaacggcgatgtgttcaagtggaaaagcttttggaaagtactggcagagcagttcgatgtcgaatacgccgaatttcaggagggacaaaaactgaaacttcaggaggttatgaaggacaaaggttccgtctgggatcagattgtgcgcgacaatggcctgaccccgacaaaactggaagatgtaggtaattggtggtttagcgatttagtgctttcctctgaagggttactcgatacgatgaataaaagcaaagaacacggcttcctcggattccgtaactctaagaactcattcgtgtcatggattgataaagtgaaagcgtataagatcgtccct

SEQ ID NO: 1227 - DNA, 1170 bp, Brassica napus
atgagctggtggtgggcgggcgcgataggcgcggccaaaaagaagtttgatgaagatgagccgacccaaacgtatgagtccgtggcgctgattattggcgtaaccggtattgtcgggaatagcctggccgaaatcttgcctctgagcgataccccgggcggcccatggaaagtatatggtgttgcccgtcgcccgcggccgacgtggaacgccgatcatccgattgattacattcagtgcgatgtctccgacgaggaagacgcacgtagcaagctttctcctctgcgcgatgtgacacatgtcttctatgtgacctggaccaatcgctcggtggaaagcgaaaattgcaaagttaatggatctatgttgcgtaatgttctgcgtgcggtagtccctaatgcaccgaaccttcgtcatgtgtgcctgcaaacaggtaccaaacactatctgggcccgttcgacagcgtggggaaagcggtggatcgtcacgaagcgccgtttactgaggatatgccgcgcctgaaagtagataacttttactatacattggaagatgtgctgtcagaagagattaaaatgaaggaaagcgtcacatggtcagtccaccggccgaacaccattttcgggttctcgccatatagtctcatgaatattgttgggaccttgtgcgtctatgcggccatttgcaaacacgagggtagtaaactggtgttcccgggcagtaaagaagcgtgggaaggatttacgacggcgtctgatgcagatttagttgcggaacagcaaatttgggcagcggttgatccgtacgcgaaaaacgaggcctttaactgctcaaacgcggatgtattcaaatggaaacatttgtggaagatactggctgaacaattcggcattgaagaatatggctttgaagagggcaagaacgtgggcctagttgagatgatgaagggcaaagaacgtgtatgggaagaaatggtgaaagagaaccagctccaagttaaaaaattagacgaagtgggagtatggtggtttgcggatgtcgtcctgggcgtcgatggaatgatagatagtatgaataaaagcaaagagtatggttttttgggttttcggaactctaataacagtttcatcagctggatcgataaatacaaagcattcaaaattgtcccg

SEQ ID NO: 1228 - DNA, 1167 bp, Ziziphus jujuba
atgagctggtggtgggcgggggccatcggcgcggcgaaaaagaaatttgattcggacaatgcgccggcaaaacaccattccgtggcgttagtagttggagtaaccggcattgttggcaattcgctggcggagattttgccgttaagcgacaccccaggcggtccgtggaaagtgtacggcgtggcccgccgcccgcgacccccctggaacgccgatcatcccattcattatattcaatgtgatgtgagtgacagccagcagaccaatgagaagctttctgatttaacggatgtcactcatattttttacgtggcgtggacgtcacgtccgaccgaagcggaaaatagtgatattaatgggcgaatgttgctgaatgttctgaacaccgttattccgattgccccgaatctgttgcatatctgtctgcagacgggtcgtaaacactatatgggcccgtttgagctgctgggtaagatcaaaccgcacgaacccccgttccatgaagacctgcctcgtctgaaagttcctaatttctactatacccaggaagacattttactggccgaggttaacaagaaacaaggtctgacttggtcagttcatcgccccggcgtgatttttggattctcaccttatagccttatgaacattgtcgtttcgctatgtgcctatgcctccatttgtaaacaccagggtcaggcactgaagttccctggaagtcaggcggcgtgggatggcttctgcgacgcctccgatgccgatctgatcgcagaacatgaaatatgggccgccgtggaccccttcgctaaaaatcaggcgtttaattgttcgaatggggatgtatttaaatggaaacatctatgggaagtattagccgagaaatttgggcttgagtactcagcggaattcgacgttaaactgacactggaggagatgatgaaaggtaaagattgggtttgggatgaaattgttaaagaaaagaacctcgtgcctaccaagctggaggagattggaggctggtggttcgcggatattatcctgggcctcaacgaactgcacctggattctatgaacaagaacaaagagtacgggttcgtggggttccgcaactcaaaaacctcctttggcagctggattgataaaattaagtcatatcgcattgtcttg

SEQ ID NO: 1229 - DNA, 1182 bp, Punica granatum
atgtcttggtggtgggcaggggccattggtgcagcaaaaaagaaatttgaggaagacgatgcgccgaaatcgttccaaagcgtcggcctagtagttggcgtgactgggattgttggtaactccctggccgaaattcttccgctcgcagacacacctggtggtccgtggaaagtatatggtgtggcgcgtcgcccgcgcccatcctggaacgcggatcatcccgttgagtacatccaatgtgatatctcagaccctcaggacgcagaatccaaattaagcgtgctgacagatgttacgcacatcttctatgtgacttggacaaacttgatcgcggaggtggaaaactgcgaggtaaatggtcgcatgttgcgcaacgtgctccgggcggtcctgccgaatgcgccgaatttatgtcatgtctgtttacaaacaggtcagaaacactatattggtaattttgaagacatggccaccggtaaagtgcgcccgcacgaaccaccctacaccgaagacctgccacgtcttgattgcccgaacttttattacaccctggaggatatcttatacgaggaagtagccaagaaagacggtgtatcgtggagcgtccatcgtccgccggtgatttttggcttcagcccgtattcactgatgaatatggtaggatccctgtgtgtttatgctgcaatctgcaaacacgagggaacgcccctgaagttccctggtaccaaggaaacatgggagtgttattgcatcgcgggagacgctgacctgattgccgaacagcagatttgggcagccgtagatccttatgcccgtaacgaggcctttaactgtagcaacggcgatgtgttccgttggaaacatttctggaaggtcctggccgaacaatttggtattgaagaatatggattttataaaaaagaaggtaaattgggactggaagaagcgatgaaagggaaagaaaaagtgtgggaggaaatagtccgcgaaaaccaactgcagccaactaagctggaagaggtgggcatctggtggtttgtcgatttagtcttatccggtgatgcggggctggactcaatgaataaaagtaaggagcacgggttcctgggttttcgcaactctcgtaattcttttatttattggattgataaggtcaaaggctataaaatcgtcccgggtgcg

SEQ ID NO: 1230 - DNA, 1173 bp, Capsicum baccatum
atgtcctggtggtgggccggcgcgattggcgccgcaaaaaaaaaatttgaagaagatgatgccccgccgaaatacgatagcgtggctctgattattggggtcactggcattgtcggcaacagcctggcggaaattctcccgctggctgacacgcccggtggaccgtggaaagtatatggcgttgcgcggcgtttccggccgtcgtggaacgcggatcatccgattgagtatgtgcagtgtgacattagtaaccctgaagatacccagtcaaagctgagcgtgctgacagatgtaactcacgtcttttatgtgacttgggcgaatcgctcaacagaagtagaaaattgcgaaattaatggtaaaatgttctccaacgtgctgaatgttattattccgaattgtccgaatctgcgtcatatttgcttgcagactggccgtaagcactatttagggccgtttgagctgttcggcaaggttggcaaggttggtcacgatagcccttttcatgaagatctaccgcgcctggatgccccgaatttctattatgtcctggaggatattttgtttaaagcggtggcaaaaaaggaggggttaacctggagcgtgcatcgcccgggtacaatctttggattttctccgtacagtctgatgaacatcgtgggtacactgtgcgtgtacgcagcgatatgcaaacacgaaggtttacctttaaagttcccgggcgtgaaagccgcctgggacggttatagcgattgttcggatgcggatctgatcgccgagcatcagatttgggcggcagttgatccatacgcgaagaacgaagccttcaacgtttccaacggtgatgtgtttaaatggaagcatttttggaaagtgctggcagagcagtttggggtggaaccggcagaatttgacgaaggtaaacgctgtacgctgacagagatgatgaaggataaaggcactgtctgggacgagattgtgaaggaaaatggtctggtgcccactaaactggaagaggtcggcgtgtggtggttcgttgatctgatgctggcgggcgattgtcccctggatacgatgaacaaaagtaaagaacacggcttcctgggcttcaggaatagtcaaaaagcctttattagctggatcgaccgagtgaaagcttacaaagtggttcct

SEQ ID NO: 1231 - DNA, 1167 bp, Carica papaya
atgagttggtggtgggcgggtgccatcggggcggctaaaaaaaaatttgaagaagacgacgccccgcgcagttttcagagcgtagccttggtcgtcggagtgaccggcattgtgggtaatagtctggccgaaattttgcctctatcggataccccgggcggcccttggaaagtttatggcgttgcgcgccgtccgcgtccgacctggaacgccgatcatccgattgagtacatccaatgtgacgtaagcgatatggaggaaacccgggcgaagttaagtccgattaccgacatcacccatatcttctacgttgcctggagcaatcgttctaccgaacgcgagaactgcgaggtgaacggcgcgatgctgcgtaatgtgctccaggtggtgattcccaactcacccaacctgtctcacatctgtttgcagacgggtgccaaacactatgtcggcccgtttgaaaccctcggtaaaattcagtttcacgatcctccttttactgaggatatgccgcgcttggatacccccaatttctattacacccaggaagatatactgttcgaagaagttgagaagaaagagaatttgacctggtctatccatcgccccttggtgatctttgggtttagtccgtactgtatgatgaatatggtgggtattttatgtgtgtatgcggcgatttgtaaacatgagggtagcccgcttattttcccgggcagcaaagcgagttgggacagttacagtaccgtgagcgatgctgacctaattgcggagcaacagatttgggcggcggtggatccatatgcgaagaacgaagcgtttaactgcagtaatggtgatgtcttcaaatggaaacacttttggaaggtgctggcggagcagttcggcatcgaagaatacgggttcaacgaaggcaaaagctttaagttagaagaagcgatgaaggataagggctcagtatgggatgaaatcgtgcgtgaaaatcaactgtatccttcgaagtacgaagaagtagcagtctggtggttcgtcgacgtaatctttggtatggagggtgttttgggttgcatgaacaaatcgaaagaacatgggtttctgggttttcgcaacagcaaaaactcgtttatttcttggatcgataaaatgaaaggttacaaaatagttcct

SEQ ID NO: 1232 - DNA, 1173 bp, Gossypium hirsutum
atgtcttggtggtgggcgggggcgattggcgccgccaaaaagaaattcgaagaggatgaggcgccgcgctcgtttcagagtgtcgggttaattattggtgtgacgggtatcgtgggtaactcgcttgccgaaattctgccgctgagtgacacgccaggcggcccgtggaaagtatacggggtggctcgccgccctcgccctaactggaatgcggaccatccgattgagtacatacagtgtgacattagtgatcctaatgatactgagtcaaagctgtcacagcttaccgacgtcactcatatcttctacgttagttggataaatcgtacctcggaagctgaaaactgtgaaattaatggctcaatgctgcgcaacgtcctgcatagcgtgattccaaacgccccaaatctgcgccatatttgcctgcaaactggtgcaaaacactaccttgggccgtttgagctgctgggcaaaattcaaccccacgatccgcctttcactgaggatctgccgcgtctgaacgccccgaacttttattatcaccaagaagatattctgtttgaagaaattgaaaaaaaagagggcttgacatggtctgtgcatcgacctggagtgatttttggtttcagcccatacagcctgatgaatcttgtgggctcgctctgtgtgtacgccgccatctgcaaacacgagggaaaacctctgcattttcctggctccaaggctgcgtggaactgctacttcgaagcgtcggacgcggatctgattgcagaacaacatatttgggcggcggttgatccctatgcaaagaacgaagcgtttaatgtaacgaatggcgatgtgttcaaatggaaacatctgtggtcggtgctggcagaacagtttggtattgaagaattcggctttgttgaaggcgaaaaccgtggcatggaggaaatgatgaaagaaaaagaaggtgtgtgggaggaaattgtgaaagaaaaccaactgcagaagacttcgttgcaggtggttggcaattggtggtttacggatacaattttcttggcgccgctgcagatgcctcttctcagtatgaacaaaagtaaagaacatggcttcctgggcttccgcaattctcgaaatagctttgtgacctggattgataaaatgaaggcatacaaaattgtgcct

SEQ ID NO: 1233 - DNA, 1182 bp, Cucumis sativus
atgagctggtggtgggccggcgccatcggtgccgccaaaaaaaagtttgaagaagatgagccgcctcgttcttttgaaagtgttgccctggtcattggcgtaacaggtatcgtcggcaatagtctcgcagaaattctcccactgagcgacaccccggggggcccgtggaaggtttatggtgtggcccgtcgtccgcgtcccgcgtggaacgctgatcatccgattgaatatatccagtgcgatgtgtcggatccgcaggatgcagaaaccaagctgagccaactggcggatgttacccacctgttttacgtgacttggaccaatcgcacgactgaaatcgaaaactgtgaagccaacgtcaaaatgttacgcaacgtgttacgttctgtaatcccgaacgcaccgaacctgcgtcatatttgcttacagaccggcaccaagcactacgtgggttcatttgaaagtattattaacaaatcttcccaacgacatgacccaccgtttaccgaggaccttccgcgcctggaatgtccgaatttctactataaacaagaagacctactttgggaggaaattgagcagagtcagaagaaagacttgacctgggcagtaattcgcccgaatttgatctttggattttccccgtttagcctaatgaatgtcgttggaaccctgtgtgtgtatgcggcgatttgcaaacatgagggtcgcccgctcaaattcccgggcaacaaactcgcttgggaggacttccaagttgcaagtgatgcggatctgatcgcagaacaacatatttggaccgcggtggacccgtattccaagaatgaggcctttaattgtaataatggcgatgtattcaaatggaaacatttttggaaggtccttgcagaacagtttaatattgaggaatatggcttcgatgaggagggagagagcctgaccttagtcgatctgatgaaggataagagcgatgtctgggatgagatcgtgaaagaaaaccagctgcagcagactaaactcgaggaaattggaacctggtggttcgttgacagtattttctcgatgtccggaaatatagactccatgaacaagagcaaagaacatggatttctgggatttcgtaacagcaaaaacagcttcatctcgtggatcgacaaaatcaaagcgttcaaaattgtgccc

SEQ ID NO: 1234 - DNA, 1197 bp, Citrus clementina
atgagttggtggtgggcaggcgccatcggtgcggcgaagaaaaaatttgaggaaaacgaacgccagccgcagccgcagccgcaggattaccagcatgtcggcttagtgatcggcgttacaggcatagtcggcaatagcttagcggaaattcttccgcgccaggatacccccggtggtccgtggaaggtttatggtgttgcccgtcgcccgcggcctgattggaacgcagatcacccgatcgagtacattcaatgcgatgtgtctgatcaggacgatacacaggctaaattatcgaaactaacggatgtgacccatattttctacgttacctgggcgtccagacccacggaagcggagaactgcgaggttaacggagccatgctgcgcaacgtcctccgtagcgtgattcccaacgccccaaacctgcgtcatgtgtgcttacagaccgggggcaaacactacgttggcccgttcgaatcatttggaaaaatccgcccgcatgatactccgtttacggaagacttaccgcgtttgaacgtgaccaatttttactacacccaggaagatatactgttcgaggaagttgaaaagcgtaaaggaccgctgagcttaacatggagcgttcatcgcccgcatatcatttttggcttcagcccttacagcatgatgaacgttgtcggtacgctgtgcgtgtatgcagcgatttgtaaacatgaaggagttccattgctgttcccgggctcaaaagattgctgggaaggttactcagtagcgtcagatgcagatctgattgcggaacagcagatctgggccgcggttgatccgtacgcgcgcaatgaagctttcaattgttccaatggcgacgttttcaaatggaagcacctgtggaaagttttagctgagcaattcgagattgagaactatggtctgccgcaagagggggaacgggttcgtctggaagaaatcatgcgtggcaaagagggagtgtgggagcagatagtgaaagaaaaccagctgcagttgaccaaactgtccgaggtggccgtttggtggtttgccgatatgatgttagatggcggattcctgctactggattctatgaataaatccaaagaacatggttttctgggttttcgtaatagcaaaaattcctttgtaaattggatcgacaaaatgaaaacctaccgcatcgtgccg

SEQ ID NO: 1235 - DNA, 1161 bp, Catharanthus roseus
atgagctggtggtgggcgggtgctattggtgcggcgaaaaagaaatttgaatttgatgacgcccctccaaaatatcagagtgtgggtttgattctgggtgttaccggcatcgtaggcaacagccttgcggagattctgccactctctgacacccccgggggcccgtggaaagtatatggagtggcgcgccgcccgcgtccatcatggaatgccgatcatccgattgaatacattcagtgcgatatttctgatcctgaagagacagaatctaaactcagcaaattgaccgatgtgacacacgtgttctatgttacatggaccaacaagtcgaccgaagtggaaaactgcgaagccaacggtaaaatgttccggaatgtgttgaatgcaataattcccaactgtccaaacctgcagcacatttgtcttcagacgggcttgaagcattattttggtccgtttgagttttttggaaaggcggcccaggaaaccccgtttcacgaagatctgcctcgcctggatgtaccgaacttctactatactttagaagacattttgtttgaggaggttcagaaaaaggagggactctcgtggtcggtacatcgcccaggtacgatctttggctttagcccgttcagcttaatgaatcttgtgggtaccttatgcgtatatgcggccatttgtaaacacgagggcctccctctgaaattcccgggttgcaaggaggcctgggagggctactcaatgtgtagtgacgctgatctgatagcagaacaacagatttgggcggcggttgatccgtatgcaaagaacgaagcgttcaacgtgagtaacggtgatgtgttcaagtggaagcacttctggaaggttctggccgaacagttcggcctcgagtgcgcggagtatgaaggcgacaaagtcagtctggaagagatgatgaaggacaaagaagcggtttgggaggagatcgtccgagaaaacggccttttgcccactaaactcgaagaagtcggagggttttggttcgtggattttatcttcggggtagagtatccgctggatagcatgaacaaaagcaaggagcatggttttctgggcttcagaaacagtaaaaacgcctttatcagctggattgacaaagccaaagcgtacaaaatcgtacct

SEQ ID NO: 1236 - DNA, 1167 bp, Fragaria vesca
atgtcatggtggtgggccggtgccattggtgcggcgaaaaagaagttcggacctgatgatgagcccccgaaatatcagagcgtcgccctagtgctgggagttaccggcattgtaggcaacagcctggccgaaattttaccgcttcctgatacaccgggcggcccgtggaaagtctatggtgtggcgcgtcgcccgcagcctcagtggaacgcggaccatcatatccagtatatccaatgtgatctgtccgattccgagcagaccgaaactgaattaagccagctgacggatgtgacccatatcttttacgtgacttgggcgtccaaaccgtcagaggcagaaaactgcgaagcgaacggcaagatgctcagcaatgttctgaatgctgtgattccgaacgcgccgaacctgcaacatatttgtatgcaaaccggacgtaaacaatacgttggcccgttcgagatgttcgggaaaatcgaacctcacgaaccgccgtatgtggaagatactagtcgcctcgactgtcccaacttttattacgtgatggaagatattttgttcgaagaagtgaaaaaaaaagaaggcttgacctggagtgtgcatcgtccgggaattatttttggattctcgccgtactccttgatcaacaccatcggtagcctctgcgtctacgcggcgatttgtaaacacgaaggccaaccgctgcgttttccggggtctaaaggcacatgggagggcttctgggatgcttctgacgcagatatgattgccgaacatgaaatctgggccgctgtcgagccttatgcaaaaaacgaagcgtttaactgcagcaacggagatgtgttccggtggaaacacctgtggggaattttagcggatcagttcgaagttgagagcggcggtgtcgatgaggaacttcgcgttgaagaaatgatgaaagataagggcccggtgtgggacgaaattgtacgcaaacatgacctggttccgagtaaattagaggaggtaggcaattggtggctggttgacataattttccgcattggcgtggattcttccatggatagcatgaataagagccgtgaacatggttttgttggattccgcaactcaaaaacatcatttctgtcttggattgacaaaatgaagagttaccgtattgtaccg

SEQ ID NO: 1237 - DNA, 1215 bp, Prunus avium
atgagctggtggtgggctggcgccataggtgctgcaaaaaaaaaacatgaagatgatgatcacgaagcgccgcgttctttcaagagcgtcggtctggttataggcgtgactggattggttgggaattcgttggccgaaattctcccgctgcacgatacgccaggaggtccgtggaaggtctatggtgttgcccctcgcccccgtccagattggtcagtggaccaccctgtggagtacattcagtgtgatattagcgatccgattgatgcacagaccaaactgagccagctcacggacgtgaccgacattttttacgtgacctggacaagccgatcaaccgaagcggataactgtgaagctaacggtgcattgctgcgtaacgtcttgtcgtcagtaattccaaacgcgcccaatcttcggcatgtttgtctccagacgggcaccaaacactatgacggtccgtttgaagcctacggcaaagtcgcgccgcacgatacaccgtcgacggaggatctgcctcgcttgaacgtcccgctgttttactataacctggaagacgttctattcgaagaggttgaaaaaaaggaaggcctcacttggtcggtccaccgcccgggtttaattttcggtttcagcccgtatagtatgctgagtattgtctcaatgctctgcgcgtatgccgccatctgcaaacaagagggtctggcactccgcttcccaggatcaaaagccggctgggattcctattcggaagcaagtgacgccgatttgatcgcagagcaacagatatgggccgcagtagacccctatgctaaaaatgaagccttcaacattaacaatggagatgtgtttaaatggaagcagctgtggaaagtgcttgccgaggaatgggatgtttttaaatggaaacagctctggaaagtcctggccgaagagttcgaaattgaagaatacggcttcgatgagggattttcgctggtggaaatgatgcgcgataaaggaggcgtgtgggaggaaattgttggcgaaaaccagttgcggcatactaaactggaagaactgggactgtgggaggttgttgaggtggttcttggcggcggtgcggaactttcaagcatgaataagaacaaagaacacggcttttgcgggttccgcaactcgcggaacagcctggtatattggatcgacaaaatgaaggcccataaaattgtcccg

SEQ ID NO: 1238 - DNA, 1167 bp, Salvia rosmarinus
atgtcgtggtggtgggcgggcgctattggggccgcgaaaaaaaaaatcgacgaagatgaaccgccaccaaattaccaatctgtcgcgctggtggtgggtgtgaccggcattgttggcaacagcctggcggaaattcttccgctgagtgataccccgggcggcccgtggaaggtgtacggagtagcacgccgccctcgtccttcgtggaacgaagatcatccgatcaactatattagttgcgatgtgtcagacccggatgatgtaaaaagtaaactggcccctcttaccgatattacaaacattttctacgtaacatggactaaccggagcacagaagaagaaaattgtgaagccaacggcaagatgttgaagaatgtattgaacgtggtgattccgaactgcccaaatctcaaacatatttgtctgctgacggggcgcaaacattacctgggcccgtttaacagtgtatggaagattcaagtgcccgatccacctttcacggaagatttaccgcgtctggattgtccgaatttttattacactcaggaagatattttgttcgaggaagtgcaaaagaaagaaggtttgacgtggagcgttcatcgccccggggtgattttcggttttagcccttacagcatgatgaatctggtgggtactctatgtgtgtacgcagctatctgcaaacacgaaggtgccgtgttacgttttccgggctgcaaggatgcctgggatggttactccgattgctccgatgccgatctgatcgccgaacatcaaatttgggccgcagtcgatccgtatgcaaagaatgaagcctttaatgtatcaaacggcgacgtgttcaaatggaagcacttctggaaagtgcttgcggaacagtttggattggagtgtggcgagtatgaagaaggcaaagaggtgaagctgcaggaactcatgaaagaaaagggtccggtctgggacgaaattgtacgcgaaaacggcctgtcatgcacgaaactggaagatgtgggcaaatggtggttcagtgatctcattttagaacacgccggcatgctggatacgatgaataaaagtaaggagcatgggtttctgggcttccgcaatagcaaaaatagttttatctcttggatcgacaagttgaaagcctacaaaattgtgccg

SEQ ID NO: 1239 - DNA, 1275 bp, Elaeis guineensis
atgagctggtggtgggccggtgcaattggtgcggcaaaaaaaaaaatcgacgaggattcgggtggaggtggcggagggggtgcgccgaaatttcagtccgttggcctggtcattggcgtgacaggtattgttggcaacagcttggcagaaatcctgcctctgagcgacacacctggaggcccatggaaagtgtatggcgtatcacgtcggccgctgtctgtttcttttaggcctctgaccgaaggcttagccgttgagcatatccaatgtgatgtaagcgaccctgacgatgcgcttgcgaaacttagcccgctgacggatgtaacgcacgttttttatgttgcgtgggctaaccgtattgttgaagcagagaaccgcgaggttaattccgcgctgctacgaaacgttctggcggcagtgctgccgaacgcgccgaacttacagcatgtctgcctgcagaccggccgcaaacattacctcggcagttttgaatcgctgggtaaagtaaaagcgcatgaaccgccgttccgcgaagacctgccacgcctagattgccctaacttctattatgatctggaagatatactgtttgaagagatggcgaaacgtgatggcactgttacgtggagcatccaccgtccaacgaccattttcggtttctccacctactcattaatgaacctggtgggcagtctgtgtgcgtacgcagcgatctgccgtcgcgaaggcgcgccgctgaaatggcccggtagccgcgtggtgtgggaggatttttcggatgcgtctgacgctgacatgatcgcggaacatcagatctgggcagcaattgacccgtatgccaagaatgaagcattcaattgttccaacggcgatctgttcaagtggaaacatctctggccgctcttagcccgagaattcggggtcgaatgggtgggttatgaaggcgaagaacagcgttttaaactggttgatgcaatgaaagagaaagagggcctgtgggaagaaattgtcgcggaacacgagctcgcacccacacgtctcgaagaggtgggaaattggtggtttgtggacgcggtgtttggcgtcgaagaagttcacctggattcgatgaacaaaagcaaagaacatggcttcctgggcttccgcaatactgtggtatccacaattatgtctcactgcattcttcatctggaaccgtgggatccgaacattctcactctgcaagtggaccatcgcagtgagtgcatttatgagcgtgagggtttaacattttat

SEQ ID NO: 1240 - DNA, 1173 bp, Erythranthe guttata
atgtcgtggtggtgggcaggcgcgatcggagcagcgaaaaaaaaaattgaagaagacgaaccccctcagaaacacgagggggtggccttgatagttggcgtgaccggtattgtgggaaacagtcttgccgaaattctaccgcacagtgataccccgggcggaccttggaaaatctatggagttgcccgacgcccgcgtccgacgtggaacgcagataatccggtaaactatattcagtgtgacatatctgatccggaagatacccgggttaaattatcgccgctgaccgacatcactcacgtgttctatgtgacctgggcaaacaagtccactgaagccgaaaattgcgaagttaatggtaaaatgttacagaatctgttagacgcagttatccccaacagccctaatctaaaacatatttgcctacaaactggccgtaagcactatattggcccgtttgaatcgtttggcaaaaatattccgacgcatgatccgccatataccgaggatctgccgaggctgaaccatatcaacttttattacacgctggaggatattttattcgcggaagttgaaaagaaagaaggcctgacttggagtatccatcgcccgggtaatattttcgggtttagcccgtattcgatgatgaacctggtgggtacgctgtgcgtgtacgcggccatctgcaaacatgaaggcgtgcccatgaagtttccaggaagtaaaattgcgtgggaaggctatagcgattgctcggacgccgatctgattgcggaacatcagatctgggcagccgtggatcgttttgcaaagaacgaggcattcaacgtatctaacggtgatgtcttcaagtggaaacacttctggaaagcgctggcggaacatttcggcgtcgaattcgtggagtatgaagaaggtggtgaggaagtgaaactcgaagaacttatgaaagataaggggtccgtgtgggacgaaatcgtgcgggagaacggcctgacggtgaccaaattagaagaagttggtacctggtggtttagcgatctaattcttggcggtgaatgctccctggactctatgaacaagtctaaagagcacggcttcttaggttttcgtaattcgaagagcagcttcgtctcatggatgtacaaagtgcaggcctgcaaaattgtgccg

SEQ ID NO: 1241 - DNA, 1167 bp, Helianthus annuus
atgagttggtggtgggcaggtgcaattggtgcagcaaaaaaaaaactggatgatgaagatgccccgccgaaataccagagtgtggccctgattattggcgtgaccggtattgtcggcaactcgttagccgagatcctgccattgtctgacaccccaggcggtccgtggaaggtttacggcgttgcccgccgcccgcagccgcagtggaattcagaccatccgattgagtatatacagtgtgatgtcagtgatccagatgaaacccttacaaaacttgggtgtctgcaggatgttacccatcttttctatgtaacctgggccaatcaggccacagaaagtgaaaattgtgaaattaatggcaaaatgtttcaaaacgtgctggacgctgttattccagactcgccgtcattgcaacacatctgcctccaaactggcaaaaaacattactggggcccgttcgagttatatggcaaagccagtcacgatacgccgtatcacgaagatttaccgcgtctggatgttccgaatttctactataccctagaggatattctctttgaaagcgttggacgcaaggaaggcctgacctggagcattcaccgaccgggtttgatcttcggttttagcccctactcactgatgaacctcatcggtgccctgtgcgtgtacgccaccatttgcaaacatgaaggcgtcccgctgaaattcccgggaactaaagaagcgtgggagtcctatcatgactgcagcgatgcagaccttatcgccgagcagcatatttgggctgcggtcgagccccatgcgaaaaatgaagctttcaacatatctaatggcgacgtgtttaaatggaagcacttatggaaagtactggctgaacagttcgaagtggagaacggtgggttcgatgagggcggtgagcgcgtatcactcgtcgaaatgatgaaagataaaggcggtgtctgggatgaaatcgtgcgtgaaaagggcctggtgtcaactaagctggaagaggtagcggcttggtggtttgcggacgggatgctaggcattgagggcgtattggataccatgaataaaagcaaggaacatgggtttttcggcttccgcaatagcaaatcgtcgctggtctcgtggatcgagaaaatgaaaggttacaaaatcgttccc

SEQ ID NO: 1242 - DNA, 1170 bp, Genlisea aurea
atgtcatggtggtgggccggggccattggtgctgccaaaaagaaactcgatgaagatgatgccccacccaaacatcagagcgttgctctgatcatcggtgtaacaggcatcgtgggcaacagcctggccgaaattttgccgctgtcggacactccgggtggtccgtggaaagtgtacggtgtagcacgtcgcccgcgccctccgtggaacgaggataacccgattacttatatccagtgtgacgtttccgatcccgaagacacccaggcgaaactttccccgctgtccgatgttacgcacctgttctacgccacctgggccaacaaatcaacggaagccgaaaattgcgaaataaactctcgcatgtttcagaatgtcttagactgtataatccctagtagcccatccttaaagcacatttgtctggtcaccggccgcaagcactatatagggccgttcgaaagctttggcaagatagaaccgcacgatccgccattcaccgaagatcttccgcgcctggaccacattaatttctattacgaccttgaagatatcctctttgaacaagtaaaaaaaaaagaaggcctgacttggtctgtacatcgcccgggcacaatcttcgggttctcaccgcacagtatgatgaatatcgtgggcacgttgtgtgtgtataccgccatttgcaaacatgaaggtgtgcctctccgctttcccggcgtgaaagctgcctgggaaggctacagcgattgtagtgattcagatctgatcgcggagcatcagatctgggcagcggtggacccttacgccaaaaacgaggcgtttaatgtgagtaacggagacgtgtttaagtggaaacacttatggaaagtgctggccgatcaattcggtgttgagaatggtggcttcgttgaagagggtgaacgtgcgactctggcggatctgatgaaagataaaggcccggtgtgggacgaaattgtgcgtgaaaacggcctgttgccttgcgaactgaaggacgttggactgtggtggtttgttgacttaatgctgggaggcgaggctcttttagattctatgaacaaaagcaaagagcacggttttctgggttttcgcaacagcaagaattcgttcgctagttggattgataaggtgcgcgcctacaagattgtcccg

SEQ ID NO: 1243 - DNA, 1053 bp, Arabidopsis thaliana
atgagttggtggtgggcaggagccatcggtgcggccaaaaagaagctggatgaggacgaaccgtcccagtcgtttgaatcagtggcattgattatcggagttacaggcatcgtaggtaacagcctggcggaaatcctgccgcttagcgatacccgctcgaagttaagccccctcacggacgtgacccatgtattttatgttacctggaccaatcgcgaatctgaaagcgagaattgtgaagcaaacggttctatgttgcgtaacgtgctgcaggccattattccgtacgcccctaatctgcgccatgtctgccttcagacaggtaccaagcactacctgggcccgtttacgaacgttgacggaccgcgtcacgacccgccgttcactgaggacatgcctcgtttgcagattcagaacttttactatacccaggaggatatactgttcgaagaaatcaaaaaaatcgagaccgtcacgtggtccatccatcgtccgaatatgatttttggttttagcccctacagtctgatgaacatcgtgggcaccctctgcgtgtatgcagccatttgcaagcacgaaggtagccctctcctatttccgggcagcaaaaaggcatgggagggctttatgactgccagcgatgcggatctaattgcggagcagcagatttgggcggcagtcgatccgtacgcgaaaaatgaagcattcaactgtaataatgcggatattttcaaatggaaacatctgtggaaaatcctggcggagcagtttggtattgaagagtatggatttgaagaaggtaaaaaccttggtctggtagaaatgatgaaaggcaaagaacgagtgtgggaggaaatggtgaaagaaaaccagttgcaggagaaaaaattagaagaagtgggcgtatggtggtttgcggatgtgattttaggcgttgagggcatgattgacagtatgaacaaatctaaagaatacggtttcctgggctttcgcaatagcaacaatagctttatatcgtggattgacaagtacaaagcgtttaaaattgtcccg

SEQ ID NO: 1244 - DNA, 1170 bp, Lupinus angustifolius
atgagctggtggtgggcgggtgccattggggcggccaaaaaaaagctggacgaagaagaagcccccccgacttcgtttcagaatgtgggtctggtcataggtgtgacaggtatcactggcaactctctggccgaaatcttgccgctcgccgatacaccgggtggaccttggaaagtctatggcgtggcacgccgtcctcgtccttcttggaacgcggatcaccccattcagtatatccaatgcgatatctcagatccgaatgacacgcagagcaaactgtcagtgctgaccgatgtgacccatgtgttttatgtcgcgtatacgaatctgcctacggaagcggaatcgtgtcaggttaatggtgacatgctgcgtaatgtgctgcgttcggtcatccctaacgcgccgaatttacgccatgtttcgcttcaaaccggctgcaaacactacattggtccgttcgaattaattggaaagattaaatcacatgaacctcctcacaccgaagatttaccccgacttgatgccccgaatagttactacactcaagaagacattctgtttgacgaaaccgaaaagatcgaagacctgacctggagcgtgcatcgtccgcagatcatcttcggattttcgccgtattcgtccattaacgtgattcgcaatctgagtatctatgccgcgatttgcaaacatgaacgcgtccctcttaaattcccggggactaaagatgcatgggagtgctatgcaattgcgagcgacgcagatcttatcgccgaacagcatatttgggctgcggtggatccttacgccagaaacgaggcatttaactgttccaatggagatctgtttaaatggaaacacatgtggcctgtgctggcagaacagtttggcattgaagattacggctttgaagaaggctctaaactgaaattaagcgaattcatgaaagataagggatctgtgtgggacgaaattgtgaaggagaatcagttgctgcctatgaaattagaggaagtatcagattggtggtttttggatctgctgtttagcatcgaatcaccgatggatagtatgaacaaaagcaaagaacacggttttctgggatttcgcaatagcaaaaactcctttatcacttggattgacaaggccaaaacatacaagattgtgccc

SEQ ID NO: 1245 - DNA, 1215 bp, Ananas comosus
atgtcatggtggtgggcgggagcaattggcgcggccaaaaaaaagttggatgagaatgcggaggccgcggcggcggcagtgccgacacgctacgagtctgtaggtctggtagtgggtgcgaccggtattgtgggcacctccctgttagaaatcttaccgctgagcgataccccggggggtccgtggaaggtatatgcggtcagccggaacccgcgcccgtcctggtctccaccgatttgcgatggaccgagcgtagaacatgtgcaatgtgacctgtcagacccagacgacgcggcggcgaaactgtctccgctggcagacgtcactcatgtgttttacgttgcgtggacctcacgtccgagtgaagatgagaatcgggcagcgaacaccgcaatgctgcgcaacgcgttaagcgtgttagtgccggccgcaccgaatctgcagcacgtttgtttgcagacggggcgcaagcattatgtcggaccgtttgaagccctgggccgtgtaccagcccatgatccgccgttccacgaagatctgccgcgcctggatgtgccgaacttttattatgacttagaggatgcgctgctggatgaactttcgaaacgcccatcctcctcatccccggtgagctggagtgtacatcgtcccagcgtgatttttggcttcagcccgcgtagcgcaatgaacctggtggaaaccttgtgcgtatatgcggccctttgccggcgggaaggggccaaactgaggtggccgggcggccgcgtcgcgtgggagggctttagtgatgcgagcgatgcggatctggtggcagaacatcagatatgggcagccgtggatcctttcgccaagaacgaggcctttaattgcagcgacggcgacgtgtataaatggaagcacctgtggccgattctggcggaccagtttggcgtggattgggtggggtatgaaggtgaggagaaacgctttaaactagccgaagcgatggagggcaaagaacagctgtgggccgaaatggtcactgaacacgagttgaccccgacgcgcctggacgaggttggtaattggtggtttgccgacattatgtttggctatgacgctgaacatctggatagtatgaacaaatcgaaagaacatggtttcctgggatttcgtaatacggtcagttcgtttaacacctggatcgacaaaatgaaagcgtataaaattgtgcct

SEQ ID NO: 1246 - DNA, 1185 bp, Beta vulgaris
atgtcatggtggtgggctggcgcgattggagccgcgaaaaagaaactcgaggattcggacgacgtgtcgactacctcaattaactatcaaagtgtagcactgatcgtgggcgttaccggtatcgtgggcaattcgttagcagaaattctgccgttaagcgataccccgggcggaccatggaaggtttatggcgtggctcgtcgtcctcgcccaaattggaatgccgaacatccgatcgaatacatccagtgcgacatctccgataaagatgatgtagtactgaagttgagcccgctaactgatgtgactaacatcttttatgtttgctgggcaaactgtgtgaccgaagcggaaaactgtaagattaactcgatgatgttccaaaacgttttgaatgctgtcgtgccgaacgcgcctaatctcaaacatatctgtttgcaaactggcatgaaacattataccggtgccttcgagtattgggggaaagtggaacaccttttagatcctccttactcggaagacatgccgcggcttgaactacctaacttttattacgatcttgaggacattctttacgcgcaagtggcaaaaaaggaggatatcacctggtcggttcatcgtccgggctgtatttttggattcagcccgtacagcgtcatgaacgtgcttggcacattgtgcgtttatgcggcaatatgtaaacatgaaggcatcccttttcggttcccgggatccaaaattatctgggagtcgtactcgcaggcctccgatgctgatttaatcgcggaacaccaaatttgggcggccgtggatccttacgcgaagaacgaagccttcaattgctctaatggcgacgtctttaagtggaaacatctttggcaagttctgggagagcagttcggagtggaagtagcagagtttgatgaacgagttggggggttttcactggcggagtggattaaaggtaaagattcagtatgggaagaaattgttaaagaaaatgacctggtggcgaccaaactggaagaagtgggcacctggcagtttgtggatatggcgtttagctggaactggcccttagataccatgaataaatccaaagaacatggatttttaggttttcgaaatacaaaaaatagccttatttattgggttgataaaatgaaagcctacaagattgtcccc

SEQ ID NO: 1247 - DNA, 1182 bp, Gossypium raimondii
atgtcgtggtggtgggcaggggccattggtgccgccaaaaaaaaattagaagaagacgagacaccgaaatccttccagagtgttgccttagttgttggcgtgacaggtattgtaggcaacagcctggcggaaattctgccactttccgatactccgggtggtccttggaaagtgtacggcgtggctcgccgtccgcgtccgcattggcatgcggaacatcgcatcgaatatattcagtgcgatgtgagtgatccgaaagatactgaatctaaactgtcccagcttacggacgtgactcacattttctatgttagttgggtcaatcgcacgacagaaacagataactgcgagataaacggttctatgctgcgtaacgtcttacacacccttattcttaatgcgccgaacctgcgtcacatttgtctacagacaggcgccaaacactatgtgggctccttcgaatatattacgtcgggtaaaatcgaaccgcatgatcctccgtttactgaagacttgcctcgcctgaacacaccgaatttcttctatgttcaggaagatatcctactgcaagaaatcgagaaaaagcaaggcctgacatggtccgtacaccgtcctaataccatctttggcttctccccgtacagtcttatgaatatcgttggcaccctgtgtgtgtatgccgctatttgtaaatatgaaggtaaaccgctactgtttccgggcaataaagttacgtgggaaagctattcggaagtcagcgacgcagaccttatcgcggaacaccaaatctgggccgccgttgacccttacgcgaaaaacgaggcgttcaatgtaaacaatggggacatcttcaaatggaaacacttgtggaaagttctcgctgaacagtttgggattgaaaaatatggtcttgaggaagggaaaaatgtaggccttaaagaaatgatgaagggaaaagaatctgtgtgggaaaagatagttaatgagaaaggactccagaagacgcgcctggaggaggtaggcttttggtggttcgttgatatcctgttaagcatgatgcccatggagtccccgattttatgtatgaacaaatccaaagagcatggtttcctgggctttcgcaattcaaaaagctctcttatcacttggatcgataaaatgaaagcctttaaaatcgtccct

SEQ ID NO: 1248 - DNA, 1170 bp, Citrus sinensis
atgtcgtggtggtgggccggcgccataggggcagcgaaaaagaaacttggtgaagatgacgaacgcaacgtggggttagtgattggcgtgacgggcattctaggcaatagcctggcggagatccttccgcgccctgacacgcccggcgggccttggaaagtgtacggcgtggcgaggcgcccgcgacctcattggaacgccgatcatcctattgaatatattcagtgcgatgtgagcgatccgcagcaaactcagactaaacttagccagctgaccgatgtgacccacattttctatacgacgtgggcctcgagtcctacggaagtggagaattgccagattaacggtgcaatgctgcgtaacgtcctgcattcagttattccgtctgccccgaatctccgccatatttgcctcgttacgggtgcaaaacactacttaggtccgtttgaagtggcaactcgccgaatgaaatcccacccgctagaaccgccgtttactgaggatctacctcgtctgaacatgccgaacttttactatacgcaagaggatattctttttgaagaggtcgaaaaacgggagggtctgacctggagcgtccaccggccacacctggtgtttggttttagtccatatagcttgatgaatgtagtgggcaccttgtgtgtttatgccgccctgtgtaagcacgaaggcattcctttgttattccccggcactaaggattgttgggaggggttctcggtggcaagcgacgcggacttaatcgccgaacaacaaatctgggcggttgtggacccccgcgcccgcaacgaagcctttaactgttctaacggcgacgtgtttaaatggaaacacctgtggaaggtgctagcagagcgtttcggcattgaaaaatatggctttgaagagggcggtgagaccgtgcgcttggaagagatattgaagggaaaggaaagcgtatgggaagaaattgtgaaggaaaaccagctgcgcccgactaaacttaatgaagtggcggcgtggtggattgccgatgtcacgtttgacatcggggcgggaatgctggtgtccatgaacaaaagcaaagaatatggcttcttggggttccgtgacagcaataaatcttttgcaacttggattgaccgtttaaaacattacaaaatcgttcct

SEQ ID NO: 1249 - DNA, 1167 bp, Amborella trichopoda
atgagctggtggtgggcgggcgcgattggcgcagcgaaaaaaaaaaacgacgaggatgaaggcccagtgaaatatcagtctgtggccctggtagtgggcgtgacggggattgtaggcaactctttggccgaaatcctgccgctgagcgacacacctggtggcccctggaaagtctatggcgtggggcgtcgcccgtgcccaaagtggtctgaagatcatccgatcgaatacattcagtgcgatattctgaaccttgaagaaaccaccgcgaagcttagccctctgaccgatattacccacgttttctatgtaacatgggcagatcgtatttccgaggcggagaattgtgatgtgaacggccacatgttccgcaacgtgctggacgcgttactccctaacgcaccgaacttgcaacatatttgtttgcaaaccggtcgcaaacattatttaggccccttcgaagcgattggtcacgtcaaaccgcacgaaccgccctaccaagaagacgttccgcgtcttccgtgcctcaatttctaccacactcttgaagacatcctgtttgaagccgcggaaaaaaaagaaggcctgacctggtccgtccaccggccgaccgtgattttcggtttttcaccttatagtttaatgaacctggtaggatcactttgtgtctacgcggctatctgtaagcacgaaggactgccgtttcgctttccgggctcaaaagcgcagtgggagggctttagcgatgcttccgatgctgatttgatcgcggagcagcacatttgggccgccgttgatccgcatgccaaaaacgaagcctttaactgtgcaaatggtgacgtttttcgttggaagcaactgtggaagatcttgggcgaacagttcggtttagaactcgttgagtacgaaggtaagggtttttcgttggtagaagccatgaaagaaaagggcccggtctgggataccatcgtcaaagaaaacgaactgagcgaaacgaagctgcaagaggtggcgcagtggtggtttgccgatgtgatgctggataatgaaggcgtagggttagactctatgaataaagcaaaagaacatggttttctgggtttccgtaataccctgacgagcttcagttcgtggatcgataagatgaaagcgcataaaatcgtgccg

SEQ ID NO: 1250 - DNA, 1236 bp, Musa acuminata
atgtcttggtggtgggctggagccattggcgccgcgaaaaagaagacaacgggcgacgatgcagatgcaccggcggcgcgctatcagagcgtcgcgctggtggtgggagcgaccggtatcgttggctcgagtctctatgatattctgccgctagccgatactccgggtggtccctggaaagtgtacggcgtgtcgcgtcgccctccgcgcccgagtcttctttcaccgaacattgcggatggcgtaggcctgccggttgtgcacgtcccatgtgatgttgcggatccggcggacgcgctggcaaaattgagcccgctaggcgatgtgacccacattttctatgctgcatggtgccgtcgctcaaccgccgccgaaacccgggccacgaacgcggccatgctgcgtaatgtcctggacgccgttctgccggcggcgccgaacttgcagcacgtgtgcttacaaaccggtcgcaatcattatctgggtccgtacgggccggccggcggtgtggtggccgaagtaggtccccgtcacgatccgccgcatgacccgccgtttccggagaataccccccgtttggcgatacccaacttttactacgaactcgaagatgtgctcctggaagaattggccaaaaaagaacgtgccgttacgtggtcggttcatcgcccaactaccattttcggcttttcgccgtgcagtttgatgaatttagtgtgttcactgtgcgtgtacgcttccatttgccgtaaagaaggcgttccgctgcgctggtttggctccgaggaagcgtggtatggtttttcggacgcgagcgacgcagacctggtagcggagcatcaaatttgggcagcagttgatccctatgccaaaaatgaagcgtttaactgttcaaacggcgatgtgtttaagtggaaacatctatggcccgtgttagcagaacagtttggcgtgccagcggttggttacactgggtacgacggtcgtttcaagctcgaagatgccatgaaaggcaaggaggcggtgtgggaagatattgtacgagaaaacgaattagttccaaccgcgctcgacgaagtgggccattggtggtacgccgatgccgttttaggtttagagttcgaacatctcgataatatgaataaaagtaaagaacacgggtttctgggttttcgcaattccgtcacgtcgttcaatacctggattgataaacttcgtgcgtacaaagttgttcct

SEQ ID NO: 1251 - DNA, 1068 bp, Zostera marina
atgagctggtggtgggcgggtgccattggagcagcgaaaaaaaaagtggacgatgatgaagcggaaaccgaaaggatcccgatccgttacgagtcagtaggcttagtaattggtgcgacggggattgtaggcaatagcttggtggacattttaccgttaccagatactcccggtggaccatggaaggtgtatgcagtggcgcgacggccgcgcccgacgtggaatctgaccgatcaccccgttgaatacattcagtgtgatgtttcagacgtaacggacgtccaagccaaattatctcctctaacggacgtcactcatattttttacgtgacccgcgccccgggaaaaacagaggaagagaactgcgcggtgaatggtcagatgcttagaaatgtgctggatgccgtgattcccaatagcgtgcgcctgcaacatatttcactgcagacagggcgtaaccactacgtgggtccgcctgaactgtcagatgaaattgaaattcacgatcagccgtatcatgaagaactgccgcgactgaacggcccgaatttttattatacgcaggaagatatcctggcccggtacgagggtgttccgttccgatttccgggcggcaaacatgcctgggagggtttctcggatgctagcgacgcggatctgatagccgagcatcaaatttgggccagtgtggacccgtatgcgaagaacgaagcttttaactgctcgaatggcgacatttttagctggaaggtgatgtggaaagtgttgtctgaacagctggagcttgaatgtgttggttacgaaggtgaagagaagcgcttttcacttgaggaagctatgaaaggcaaagaaggtatttgggaagcaatggtgaaagaaaatggcctgtctgaaacttctctaagcgaggtgggtaattggcagttcgtcgatcgctgcctgaattctgaaaagacccacttagattcaatgaataagtcaaaagaacatggcttctccggcttccgcaactctattaactcactgatttattgggttgataaggtgaaaacgtaccgcattgtgccg

SEQ ID NO: 1252 - DNA, 1167 bp, Cephalotus follicularis
atgagttggtggtgggccggcgcgatcggtgccgcgaaaaaaaaatatgaagaagatgaacaaccgcgctcttaccagagcgtgggtctcgtcgtaggtgttaccggcattgtgggcaatagcctggccgaaattctgccgctgtcagacacgccgggaggcccgtggaaggtctatggtgtggcgcgcaggccgcgaccggattggaacgcggaccaccctgttgattacatacagtgtgacgtgagcgaccccaccgaaactcagagtaaactctcgaccctcaccgatataacacatatcttttacgtgacatgggcgagtcgtagtacagaggtcgaaaactgcgaagtgaacggcgcaatgttccgaaatgttttacgcgccgtgatccctaatgcaccgaacctacgccatatttgtttgcagaccggcggtaagcattaccttggccccttcgaattatttggcaaaattcaggctcatgacccaccgttcaccgaagatctgccgcgtttagatgcgccgaatttttattatacgctggaagacgttctcttcgaggaagttgaacagaaagaagatgtgtcttggagcgtccatcgcccgggcgcgatttggggattctcaccgtatagcttgatgaatatcatcggcaccctgtgtgtttatgcggccatttgcaaacacgaaggtaaaccgatgttgttcccgggtagcaaggcggcctgggaatgttacagcattgcatctgatgcggatctcattgccgaacaacaaatttgggctgcggttgatccttatgcccgtaacgaagcgttcaactgctttaacggcgatgtctaccgctggaagcaattctggaaagtgttggcggaacaattcgaaatcgaagaatacggctttgaggaaggtaagaacgtaggcttggttgagatgatgaaaggcaaggaagcggtctgggaagaaatcgtcaaggaaaatcagctgcaagatactaaactgaaagacgtcggtgtatggtggtttgtagacctagccctgggtggtgaaggcaccatgctgtgcatgaacaagtcgaaggagcacgggttcctaggcttccggaattccaaaaacagtttaattaattgggttgataaaatgaaagcgtataaaattgttccg

SEQ ID NO: 1253 - DNA, 1182 bp, Ipomoea nil
atgtcctggtggtgggccggcgctatcggtgcggccaaaaaacgcttcggtgaagaagacgatgcaccaccgaaacaccagagtgttgctctgattttgggtgtaaccggtatcgtaggtaactcattggccgagatcctgcctctggccgacaccccgggcggtccgtggaaagtatatggcgttgcacgacgtccgcgtccagcgtggaatgcggatcaccctatccagtacatccaatgtgacattagcgccgaggaggatgcccagagcaagctgtcggtgctgaccgatgttacccacgtattttacgttacctgggcacatcgcccgaccgaacttgaaaactgtgaagttaaccgaaaaatgctcggcaatgttttaaatgccgtagttccgaactctccggatctgaaacatatttgtctgcagaccggtcagaaacactattggggcccgttcgagttgagcggtaaactttcacacgatcctccgcatcatgaagatctgccgcgcctggacgccccgaacttctattatgttctcgaggacttgctgttcgatgaggtcaaaaaaaaaaaggaagagggcttaaccctgacatggtccgtgcaccgccctggaaccattcatggcttctccccttatagcatgatgaacattgtaggcaccctatgcgattacgcggcgatctgcaagcacgaaggggccccactgcgcttccctggaatcaaagacagctgggatggatacagtatttgctctgacgccgatctgattgctgaacaagagatttgggcggcggtggatccttatgcgaagaatgaggcgttcaacgtgagcaacggcgatgtcttcaaatggaaacacctgtggaaaatattagcggaacagtttgaggtagaagcaggtgaattcgaagaagaaggtgaacgtctgacgcttcaagaaatgatgaaagaaaagggcccggtgtgggacgaaattgtcgagaaaaacaaccttcagcccaccaagctggaagatgttggcgtttggtggttcgcggatgtcattcttgggatttgttacccgttagattcaatgaataaaagtaaagagcacggtttcctggggttccgcaatactcataaagcgttcatctcctggattgatgaaatgaaagcccataagatcgtcccc

SEQ ID NO: 1254 - DNA, 1173 bp, Ricinus communis
atgtcgtggtggtgggcaggcgcgattggtgcagcaaaaaaacgtgtcgaagatgacgatccgcaaccgaaataccagtcagtggcgttgattattggcgttaccggtatcgtgggaaattctctcgcggaaattctgccgctggctgacactccgggcggtccatggaaagtgtatggcgtggcgcgacgccctcgtccgatctggcaggctgatcacctgatcgaatacattcaatgcgatgttagcaacgaagaacagacactggagaaactgagcactttaaaggatacgacgcatattttctttgtcgcgtgggcgagtgaaccgaccgaagcggaaaattgcattgtgaacggtaccatgctgcgcaacgtgcttcgagcagttattccgaatgccgaaaacttgcagcatgtgtgcctgcaaaccggtcgcaaacattatgtaggcagctttgaatcaatctggaaaatcccaagccacgaaagcccctttcacgaagatcttcctcgccttaatgacattaacttctactataccttagaagatgttctgtttgatgaaactcagaaaaaggaaggtttaacgtggagtattcatcgcccgggcgttatttttgggtttagcccctgcagcctcataaatatggtcggtaccctttgcgtgtatgccgcgatttgtaagcaccaaggcctgccgttaacctttcctggcaacagagacgcttgggatggttactgggatgccagcgacgcggatctgatcgccgaacaccaaatttgggccgcggtggatccatatgcaaagaacgaagcgttcaattgcagtaatggtgacgtattcaaatggaaacacctgtggaaggaactagccgaacagtttgaaattgaaaattacggcttcgaagaagaaaacgataaacgtccatctctggtcgagatgatgaaaaacaaaggcccagtatgggacgaaatcgtcaaagaaaaagaactgctaccgacgcgtctggaggaagtggccgccttctggttagtagatctcttgttgcagggcgcgtcgctcttggatagcatgaataaatcgaaggagcatggattccttggctttcgtaactcgaacaaatcgtttgcaagctggatcgacaaactcaaagcacagcgcattgtgccg

SEQ ID NO: 1255 - DNA, 1200 bp, Elaeis guineensis
atgtcgtggtggtgggcaggcgcgattggtgccgcccgtaaaaaatttgatgaagacagcggaggcgggggagccgcggctaaatttccgtccgttggtttggtaataggagttacgggtattgttggtaatagcctggcggaaattctgccgttagccgacacgccgggcgggccttggaaagtctacggagtatcccgccgtccacacccaagtagcctggcgagtcaaacagagggcttggcgattgaacacgtacaatgtgatattagcgatcgcgaagacgccctggcgaaattgtcaccgctgaccgatgtgacacacattttttatgtagcctgggttaaccgttcgaccgaagcggaaaaccgcgagatcaacagcgccatgctgcgcaacgtgctgaccgccgtgatcccgaatgcgcccaatctccagcatgtatgcctgcaaaccgggcgcaaacactatctgggaagctttgagtcgttaggcaaagtcaagggtcatgaacctcctttcgtagaagatttacctcgtctggattgcccgaacttctactatgatctcgaagacattctgttcgaagaggttgcaaagcgtgaaggtgccgttacatggtcgatccatcgcccaaccaatatttttggattcagtccatcaagcttaatgaatctgatgggtatcctgtgtgtttacgccgcaatttgccgccgcgaaggcgtgcctctgcggtggcccggcagccgagttttgtgggaaggcttcagcgacgctagtgatgccgacctcattgccgaacatcagatatgggccgcggtggatccgtacgccaaaaacgaagcgtttaactgcagcaacggcgatgtgtttaagtggaagcatttgtggccgctcctggcgaaagagttcggggtggaatgggtcgggtaccagggcgaggaagcccgctttaaattggaggatgccatgaaaggcaaggaaggcctttgggaaaaaatggtggcagagcatgaattagcccccacgcgtcttgaacaggttggcaattggtggttcgccgatgttgtgctgggcttggaagaagaatacttggattccatgaacaaatccaaagagcacggttttttgggctttcgcaataccgtgacgagcttcaactcgtggattgacaagatcaaagcgtacaaaatcgtgcca

SEQ ID NO: 1256 - DNA, 1200 bp, Citrus clementina
atgtcttggtggtgggcgggtgcaatcggcgcggcccgtaaaaagttcgaagaggacgaacccgcgcgctcatatcagtcggttgccctgattgtgggagtcaccggtattgtaggcaacagcctggcggaaattctgccgctcccagacaccccgggcgggccgtggaaagtctacggcgttgcgcgtcgtcctaaacccaattggaacgcggaccacctcgtggaatatgtgcaatgcgatgtgtccgacccggaagaaactcaggctaaactgagccagctgacggatgttactcatatattctatgtaacctggaccaatcgttcaacggaagcggaaaactgcaaaatcaacgggagcatgttccgcaatgtactgcgcgcagtgattccgaacgcacctaacctgcgtcatgtttgcttgcagaccggtaccaaacactatctgggcccgtttgaagcgtttggcaaaattaaaccttacgacccgcccttcaccgaagacatgcctcgcctggacgcgcctaacttctactatacattggaagacattctgtttgaagaggtggaaaagaaagaggaactcagttggagtgtacaccgcccggataccatcttcggcttttcaccgtatagtctgatgaacttggtcggggccttatgtgtttatgccgcggtgtgcaaacatgaaggtattccgctgcgcttcccaggtaccaaagcggcctgggaatgctatagcatcgctagcgacgccgatcttattgcggaacatcagatttgggcagcggttgatccgtacgcaaaaaatgaagcatttaattgtaacaacggagacgtgttcaaatggaagcacctttggaaggtcctggcagaacagtttggaattgaagattatggcctgtcagaagaagaagaagaggaagaggaaggaggcggtggcacccagagggtgaagctcgcagaatttatgaaagggaaagaaggcgtatgggaagagatcgtccgcgagaatcagctgcagccaacccgattagatgaggttggtgcgtggtggtttgtggacctggtacttactggtgaggcgaaactggcgtcgatgaacaaaagcaaagaacatggcttttcggggttccgcaatagtaaaaatagcttcatcacctggattgataaagctaaaggctacaaaatagtgccg

SEQ ID NO: 1257 - DNA, 1230 bp, Musa acuminata
atgagctggtggtgggcaggcgcgatcggtgcggctcgtaaaaaactggaagacgattcaagctctaccgtgccgaaatatgaaagcgttgccattgtgataggtgccaccggcattgttggaacttccttagtggatatcctgcccttagctgatactccgggcggtccttggaaagtgtacgctgttagcaggcgtcccccaaacagtgcaatcctgccgtactcgtacagtcctgccgacgctgaagcgccggtggcggcggatacactgcgcgtgcagcatatccagtgcgatgtgcttgacgcggctgatgcagtagccaaactcagtccgctaacggacgttacgcacctgttttatgtagcttgggccaaccgcttgaccgaggctgaaaaccgcgtggtgaattccgccatgctgcggaatgttctgagcgccgtggtaccttcagcgccgaatctgtgccacgtgtgtttgcagaccggacgtaagcactacgttggaccctttgaagccgtcggcaaagccctggcgcacgatcctccgttccgcgaagaccttccccgcctgccggtgccaaacttctactacgaccaggaagatattttgttcgacgaactgagcaaaaaagagggtgctgtaacctggtcaatccaccgtcccacaactatcttcgggttctcgccgacctcgttgatgaacctgattggtaccttgtgtgtttatgctgctatctgccgcaaggaaggcgcgccgttgaagtggttcggaagccgtacaacctgggacgggttcaacgatgcatcagatgcagatctgatcgccgaacaacaaatatgggcagcggtggacccgtatgcgaaaaatgaagcctttaacatttcaaatggggacctgtttaaatggaaacacttgtgggcggccttagcggaccagttcggcctggaaagcgtcggttacgaaggcgaagccagccgctttaagttagaagatgccatgcgcggtaaagaggctgtgtgggcggaaattgtggccgaaaatgagcttgtaccgacaaaactggaggaagtcgcctcctggtggtttgcggacgttgtgttggggctggagctggcgcatcttgatagcatgaacaaaagcaaagaacatggctttttaggctttcgcaacacggttgcctcgtttaattcatgtattgacaaaatgaaagcgtttaaaattgtgccg

SEQ ID NO: 1258 - DNA, 1170 bp, Theobroma cacao
atgtcgtggtggtgggcgggcgcaattggcgccgcccgtaaaaaactcgaagaacatgatgaaccatcaaaatacaagagcgttgctctggttatcgggatcactggtatcgtgggctcctccctggcagaaattctgccgttttccgatatcccaggcgggccatggaaggtctacggtgtggcgcgccgaccgcggccggcatggaccaacgcgttgcctattgactacattcaatgtaacatatcgaatgaggaggagacgcaagaaaagttatccaagctgaaagacgtgacccatattttctatgtcgcgtgggctaagaaatcatctgaagccgaaaactgtatggtcaatggcacgatgctgcggaacgtactgaaagccgtgatcccaaacgcgccgaaacttaagcacgtgtgtctgcaaaccggtcgccgccactatacaggtccgttcgacagcgtgggcaaagtccagcctcatgacccgcccttccgcgaagatttaccgcgcctgccggttctgaatttctgctataccctggaagatgtactgttcgaggaagttaaaaaaaaagatggcctgacctggtctgtgcaccgcccgggcgtcatttttggatttagcccctgctcactaatgaacattgtcggaagcctctgtgtctacgcggcaatttgcaaacatgagggtaaacccctccgcttcccgggttctcgccaggcatgggacgggtactgggatgcctccgacgcggatctcattgccgagcatcagatttgggcagccctcaatcgccatgcgaagaatgaagccttcaactgtagcaatggcgatgtgttcaagtggaaagatctgtggaaagttctggccaaacagttcggcattgaagactatggttttcatgaaagcgatgagcgccactcactggtagaaatgatgaaagacaagggaccgctgtgggatgaaattgtgcgcgagaaaggcttagtcccgaccaagctgaacgaagtaggcgcgtggagatttgcggacgcagtactgtcaggcaaatctctcctggattcaatgaataaatccaaagagcacggcttcgtgggctttcgtaactcgaaaacgtcgtttaacagctggattgataaaatgaaaacccataaaatcgtgccg

SEQ ID NO: 1259 - DNA, 1164 bp, Gomphocarpus fruticosus
atgagctggtggtgggccggcgcaataggcgcggcgcgtcaaaagaaaaccgacgactacaccgctctgactaaatttcagtctgtaggcctgattattggggtaaccggtatagtgggtaacagtctggcagagatcctgccactgagtgatactccgggaggtccctggaaggtttacggtgttgctcgccgtccgaggcctgcctggaatgcggatcatccgattgagtatgtgcagtgtgacatcgcgaaccgcgaggacaccgaagaaaagctttcgaaacttacggatgtaacccatgtgttttacgtgacatgggcgaataagtcgaatgagattgagaactgcgaggtaaatggtaagatgcttaaaaacgtgttggacgtcctagttccgaactgtccgaaattgcagcacgtttgtctgcaaaccggggggaaacactattgcggaccgttcgaactgtatgggaaagttggtcacgaacccccatttactgaggacctgccgcggctggatgttccgaacttttattataccctagaagacgttctcttcgaagcagtgggcaaaaaagaaggactgacctggagcgttcaccgccctggcaatatttttggcttttcgccgtacagcttgatgaatctggtaggcactctctgtgtgtatgccgcgatttgcaaacacgacggtgtcccgctgaaattcccggggtgcaaagaggcatgggaaggttatagcgtgtgcagcgatgctgacttgattgccgaacaccagatttgggccgcagtagacccgtttgcgaagaatgaagcgttcaatgtgtccaacggcgacgtgtttaaatggaaacatttctggaaagtgctggcagaacagtttgacgtagagtgtggtgagtatgaaggcgaaaaattgagtcttgaggatatgatgaaagataagggaggcgtctgggatgaaatcgtggcggagaacggtctggcgccaaccaaactggaggaggttggtctttggtggttcggcgatatttgccttggttatgaatgtgcactgatgtcaatgaataagagcaaggaacatggcttcctgggcttccgaaacagcaaaaacgcgtttatttcttggattgaaaaaatgaaagcctacaaaattgtaccg

SEQ ID NO: 1260 - DNA, 1173 bp, Lupinus angustifolius
atgagctggtggtgggcaggcgctattggtgccaacaaaaaaaaatcgaatgaggaagaggaagagccgcccacgagtttcaacaacgtcggcctggtcataggcgttaccgggattgtgggtaacagtctcgctgagatcttgccgcttgccgatactccgggcgcgccatggaaattgtacggtgtggcgcgtcgccctcgcccgccctggaacagcgggcacagcatcaactatattcaatgtgatatttctgaccctgatgatgcgcagagtaagctatcggttttaaccgacgtgacgcatattttctatgttagctggagccagcaacctactgaagccgaaaactgcaacgtaaatggtgccatgctgcgcaatgtgttaacgtcagtgataccgaacgctccgaatctgcgccatgtgagcttgcagactggcgcgaaacactatctggggccgttcgaacttttcggcgaaatcaacccccacgatccgccgttcaccgaagatcttccccgtctagaagtcccgaatttctactacacacaggaagatattctgtttgaagaagtcaataaaaaagaaaatctgacctattcgatccaccgcccccattttatttttggattcagcccgtatagttttatgaacctgattggcacgctgtgcgtctacgccgcgatctgcaaacatgaagggctgccgcttaaatttccggggacaaaagaagcttgggaatgctattcaaccgcatcagacgccgatctgattgccgaacagcatatttgggccgccgtggaccccaacgcccgtaacgaggcgttcaactgtagtaatggcgacgtatacaagtggaaaaatctttgggaagttttggcggaacagtttgaaattgaagaatacggcttcgaagaaggctgtgacttgcgtcttgaagagcttatgaaggacaaaggtcacgtgtgggacgagatcgtaaaggaaaacgaactacttccgaccaaattggaggagatcggtgaatggtggtttagtgacctgatgttagggatggagcccgttctggatagtatgaataaaagcaaggaacatggttttctgggttttcgcaattcgaagaactcgtttattacctggattgataagaataaagcttacaaaatcgtcccg

SEQ ID NO: 1261 - DNA, 1122 bp, Brachypodium distachyon
atgtcgtggtggtgggctggagcgatcggcgcagttaaaaagcgacaagatgagtcagccgcagcggcggaacctagctttcagtccgttgcgcttgtcgttgggagcactggcatcgtgggcacttctttactggacattcttccgctccaggatacccccggcggcccctggaaagtctacgcgctgtctcgtcgcccgttgccaccgtggagcccgcccccgagtcctgcggtgactcatctccatctggacctggctgattcggctgcagttgctgatgccttaacgcctcttaccgatattacgcatgtgttctacgtggcatggagcaatcatccaacagaagcccagaatcgcgaggcaaacagcgcgatgctgcgcaatgttctgagcgtggtagttccaaattgtcccgcgctggttcacgtttgcctccagacgggtcgcaaacactatattggcccgttcgaagccatcggcaagatccccgcaccggatccgccgtacaccgaagacatgccgcgcctggattatccgaacttctactacgatcaggaagacgtgctgtttgatgaagttagtaggcggggtggcgcggtgtcctgcctgtgcgtctatgccgcaatttgtcgtaaagaaggtgccaccatgcggtggcccggcagtaaggtggcctgggaaggcttttcagatagtagcgatgccgatctcattgcggagcacgaaatctgggccgcggttgacccgtttgcgaaaaacgaagcgtttaattgcagtaacggagatctctataaatggaaacagctgtggccgatgcttgccgatcattttgaagttgaatgggctggctacgacggtgaggaaaaccgcttcatgctgacccaggcgatggcaggcaaggaggccgtatgggccgagatcctgcaggagaacgaattaatacgaacggaactggaggaaattacgaactggtggtttgtggatgctctcttcaatgtagaaacccagcatttagatagcatgaataagtccaaagagcacggctttctgggcttccgcaacacaacgaattcgtttaatacgtggattgaaaaaatgaaagttttcaagatcgtgccg

SEQ ID NO: 1262 - DNA, 1188 bp, Oryza brachyantha
atgagctggtggtgggcaggtgcgatcggtgcggtaaaaaaacgtcaagaagagaatgctgcggcaactgaacctagctttcagtcagtggccctggtattaggcagcacaggcctggtcggcacgagcttattagacattttgccgctccaagatactcccggtggtccttggaaggtctacgctgtgtcgcgtcgcccactgcctccctggagccctcctgactccccggcggtcacaaatctacatctagacctcgcggacccggcagccgtggcggaagccctgacaccgctgacagacatcacccatgtgttttatgtggcctggagtccgcaaccgaccgaggcccagaacttagaagtgaacgccgccatgttaagaaacgtgctgtcggtggtcgtaccgaactgcccggccttagttcacgtttgccttcagaccggtcgcaaacactacattgggccgtttgaggcgatcggcaaaattccagtgccggacccgccgtttgcggaagatatgccgcgcctgaactgccccaatttttattatgatcaggaagatgtgctgtttgaagaagtgtctcgccgcgacggtgcggtaagctggagcgtacatcgcccgactaccatctttggcttctcgccgcgcagtgcaatgaatgtggtcggtagtctctgcgtttatgcagctatctgtcgcaaggagggggccgtcttacgctggccgggtacgagagtggcatgggaaggtttctccgatgcgagcgatgcagacctcattgcggaacatgaaatttgggcggccgtagaaccgtttgctaagaatgaagcgttcaactgttctaacggtgatctctacaaatggaagttactgtggcccatgctagccgatcaattcggggtggaatggagcggctacgagggcgaagaatcgtcgtttaaattagaagacgcgatgagtggcaaagaagctgtgtgggccgaaattgtgatggagaacggcctggttgaaacagaactgaaagaaataaccaactggtggtttgtggatgcggtattcggcgtacagtccgagcatcttgacagtatgaacaaaagcaaagaacacggcttcttaggcttccgtaatacggttaatagctttaatacctggatcgagaaaatgaaagtgtttaaaattgtcccg

SEQ ID NO: 1263 - DNA, 1167 bp, Catharanthus roseus
atgtcctggtggtgggccggagcgatcggcgtggccaaacgtaagttggatgattttgacgcgccaccgaagtaccagagcgtgggtcttattctgggcgttaccggaattgtcggaaacagcctggccgaaatcttgccgctttcggacacccctggtgggccttggaaggtttacggtgtagcccgccgtccacgtccgagctggaacgcggatcatccggtagaatacattcagtgtgacatctcggatccggaagatgcacagtccatgttgtcgaaattgacagatgttacccacgtgttttacgtcacgtgggcaagcaaaagcaccgaagtggagaactgcgaagttaactccaaaatgtttcgcaatgtactcaacgcgatcattccgaactgcccgaacctccagcacatatgtctgcagactggcttgaaacattatctaggcccgttcgaactttttggtaaagcggcggtagctcatgaacctccctttcatgaagagcttccgcgcctggacgtccctaacttttattatacgctggaagatattcttttcgaggaagtgcagaaaaaagagggccttacgtggagcgtgcatcgcccgggtaacatctttggcttttcgccattttcgctcatgaacctggtaggcactttgtgtgcatatgctgcgatttgtaagcatgagggggttccattaagatttcccggctgcaaagaggcttggcaagggtacagcatgtgctccgacgcggatttaatagcagaacaccagatttgggccgccgttgatccctatgcaaaaaatgaagcctttaatgtctctaatggcgatgtgtttaaatggaaacatttctggaaggtgttagctgaacagtttggcgcggaatatgccgaatatcagggcgaacggctgtcgttgcaagaattgatgaaagataagggaccggtgtgggaaaacatcgttcgtgaaaacgggctggtgcccagcaaactggaagaagtgggggtgtggtggttcgccgaccttgtcctgtccgttgaatgtccgttagactctatgaataagtccaaggagcatggcttccttggatttcgtaactcaaaaaacgcctttatcagttggattgacaaagcgaaggcgtacaaaatctttccg

SEQ ID NO: 1264 - DNA, 1170 bp, Populus euphratica
atgagctggtggtgggcgggtgctcttggtgccgcaagaaaacagagtgaaaatggcgatacgagccgaggccaccagtccgtagcgttggtggtcggggtaacgggcattgttggaaactcactggcggaaattctaccgttaagcgataccccgggtggtccttggaaggtttatggcgtagcgcgtcgcccacggcccaactggaatttagatcaccctgtggaatacatccagtgtgacatcagcgacacagcggaaacccaagcgaaactgagccaactgaccgatgttacgcatattttctacgttacttgggcactgcggtttactgaggcggagaacattcaggcaaataacctcatgtttcgtaacgtcctccaggcagttattccgaatgcgccgaatttaaaacacgtttgcctgcagaccggactgaagcattatgtgggtccgtttgaactggtgggcaaaatcgaaccacacgacaccccgtacacggaggacctgccgcgtctgaacgcgccgaatttttactacgatttagaagacattctggcggaagaagtggcaaccaaagaaggtgtcacgtggtctgtgcaccggcctcatacaatcttcggttttagcccgtacagcctgatgaacatgatgggaacgctgtcagtctatgcagccatttgtaaacacgagggcatgccgttattgttcccgggcacggagtctgtctggaacgcgtatagcatcgctagtgatgccgacctgatcgccgaacaagaaatttgggccgcagtggatccgaacgcccaaaatgaagccttcaacattcacaatggagatgtttttaaatggaaacatctttggaaagtcttagcagaacaattcggcattgaaaagtacggactcccggagtcaggcaagaaggtgagcctaactgaactgatgaaagataagggcgctgtttgggaaaaaatcgtaaaggataatcagttactgccaaacaagctggaagaggtgggcgtgtggtggttcgcggactttgtactgggagcagaatccataatcagctgcatgaataaatcgaaagaacacggttttctaggctttcgtaacagcaaaaatagtttaatttcctgggttgacaaattgaaagctcacaaaattgtccct

SEQ ID NO: 1265 - DNA, 1170 bp, Catharanthus roseus
atgtcgtggtggtgggcgggggcggtggcggcggcgcgcaagcgatttaatgaagatgaggcgcctaaaaactttcagtcggtcgccctgatcgtcggggttaccggcatcgtaggtaactcactggcagagatcctccctttaagcgatacgccgggcggtccgtggaaggtttatggcgtggcgcgccgcccgcgtccggcgtggaatgcagaccatcctgtggagtatatccagtgcgatgtgtataatagcgacgaaacgcaggccaaaatttccccgttaactgatgttacgcacattttttggactacctgggcgaaccgtccgaccgaagcgcagtgctgcgaagtgaacggtactatgttccaaaacgtggttaacgcgttacttccgaatgcgccgaacctgagccatatttgcatccagaccggtcataaacactatatcggaccttttgaagcctttggtaaagtgaaaccgcatgacacgccgttcatcgaggacgttccgcgcttagatgcgcccaacttctactacaccctggaagatattgcctttgatgcgtgcaataaaaaagaaggcctgacctggagcgttcatcgcccggccgttatctttgggttctcgccgctttctatgatgaatttggtaggcacgctttgcgtctatgccgcgatttgcaaacatgagaacgtgccgcttacttttccggggactaaagcggcatggaactgctatagcgtcgcgagcgatgcggatttaattgcggaacatcagatttgggcagccgtggacccatatgcaaaaaatgaggccttcaattgtagtaacggggacattttcaaatggaaacacctgtggaaggttcttgcagaacagttcgaggtggattacgttgaatttgatgagaatcaagagttcgtgagcctgtcagaccgtatgaaggataaaggcagtgtgtgggatgagatcgtggaaaaaaatcagctgataccgacaaagctggaggaggtggcaacgttttggttcgccgatcttatacttgggtttgaatgcatgctggacagtatgaataagtctaaagagcacggcttcctgggtttccgcaacaccgcgaaatctttagtttcagtggtcgataaaatgaaagcccataagatcgtgcct

SEQ ID NO: 1266 - DNA, 1173 bp, Prunus mume
atgagctggtggtgggcaggtgcggtaggtgccgcgaagaaaaagttcgatgaggatgaagcgccgcgcagcccagaaagcgtaggtctggtcatcggcgtcacaggcatcgtgggcaattccctggcggaaattctgccgatttcggacaccccaggaggtccctggaaagtgtacggtgtggcgagacgtccccgcccgaattggaatgccgaccatcctgttgaatacatccaatgtgacatctcggatgcggacgacgcgaaggccaaactctcacctctgagtgacgtaacacatatcttctatgtgacgtggactaaccgttccacagaggcggaaagttgcgaggccaatggcgcaatgtttcggaatgtgctgaattcagttattcccaatgcgcccaacctccgtcatgtgtgtttgcagaccggcgccaaacattatgttggtccgtttgaagcgttcggtaaaatccagccgcatgagagcccattcacagaggatttaccacgcctcgattacccgaatttttattacaccctggaagacctgctatttgccgaggtcgaaaaaaaggatgatttaacctggagcgtacatcgtcctgatgccatctttggctttagcccttactcgatgatgaatattgtgggcaccctttgtgtgtatgcagccatttgcaaacatgaacgcgtcccattgaaatttccgggttcgaaagccgcttggaattgctattcggtagcgagtgacgccgatctgatcgcggaacagcatatttgggcggcagtggacccttacgcgaaaaatgaagcgtttaatatcaacaacggcgatgtattcaaatggaaacacgtatggaaagtcctagccgaacagttcggtattgaggagtatggtattgatgaggaagaaggagcgaagttgtccctggttgaacttatgaaagggaaggaacgtgtctgggaggagatagtgaaagagaaccaactgcagcccacgcgtctggaagaagtgggagtctggtggtttgtagatgtgtggctcggaggcgagggtctcctatgttcaatgaacaaaagtaaagagcacggcttcgtaggttttcgtaactcacgcaacagctttgtaacctggatcgataaaatgaaagcatttaaaatcgtgccc

SEQ ID NO: 1267 - DNA, 1185 bp, Ziziphus jujuba
atgtcgtggtggtgggcgggcgccgtcggagcagcgaaaaaaaaatttggcgaagatgaagccccaacctccttccagtcggttggcctggttgtaggtgtgaccggaattgtgggtaacagtctggcagaaatcttgccgttagcggacacgcctggtggtccctggaaagtgtatggcgtcgcacgtcgccctcgcccagcatggaatgccgaccacccgattgaatacatacagtgcgacatcagtgatccgcagcaaacgcaggccaaactgagcagtctcacggacgtgacccatattttctacgttacctggacgaacagaatctccgaggccgagaactgtgcggcgaatggtgccatgttccggaatgtcctgagcgccgtcatacccaatgcgccaaacctgcgtcatatctgcttgctcactgggggtaaacactatcttgcgcccttcgaatccatcggtaagatccaagcccacgatccaccattccacgaagatataccgcggttagatgctcctaatttttactatacacttgaagatatactgtttgaggagtctgaaaaaaaagaaggcggtggcttgacctggtccgtgcatcgtcctaatgtcattttcgggttctcgcccctcagcttgatgaatttgatcggttcactgtgcgtgtatgcggccatttgtaaacacttaggtttacctctaaaatttccaggcaccaagagcgcatgggacggcttctctatggtttcagatgctgatctgattgccgaacatcaaatatgggccgcggtcgacccatacgctcgcaacgaggccttcaacattaataacggcgacgtgttcaaatggaagcatctgtggaaagagctcgccgaacagtttggcattgaagattatggttttgatgacgacggagacgatggcaaacgtttaaaactcgtggagctgatgaaagacaaaggccccgtatgggaagaaattgttaaagtgaatcagttggagccgactaagttcgaagaagtgggcgtctggtggtttgcggacatgatgttaagcgaagcgggtgcactggcgagtatgaacaagagcaaggagcacggattcctcggttttcgtaacagtcgcaacagcttcgtatattggatcgataaacttaaatcctataaaatcgtcccg

SEQ ID NO: 1268 - DNA, 1185 bp, Prunus persica
atgagctggtggtgggcgggcgcggtgggcgcggcgaagaaaaagctggaaggcgcggataccacagcacctgaaggctatcagtcggtcgcgctggttatcgggctgacaggcatagtaggaaactccctggccgaaatcctgccgctccatgatactccgggcggtccgtggaaggtttatggcgtggcacgcagagcacgtcccgattggtccgtcgatcacccggttgattatattcagtgcgatattagcgatcccgaagacactcaggccaagcttagcgaacttactgatgtaacccatatcttctatgtaacctggactagccgcgctaacgaaattgaaaattgtgaagccaacggtgccatgtttcgtaacctgcttcgtgtcgtgatccctgtggccccgaatctgcgccacgtaagccttcagacgggcacgaaacattacctgggtccatttgaatgcatcggcaagattaaagcgcatgatcccccctttaccgaagacttaccgcgcctcgatgtgcctaacttctattacacactagaagacattctgttcgaagaagttcaaaaaaaagaaggcttgacgtggtcagtgcatcgcccgtataacatttttggatttagcccgcactccttaatgaatatcattggaaccctctgcgtgtatgcagcaatctgcaaaaaggaaggcaaacctctgaaatttccaggttcaaaagtggcctgggagtgctacgcgatggcatcagacgccgatttgatcgcggagcagcatatctgggcggcagtggacccgaatgccgctaacgaagcgttcaacatcaacaatggcgacgtgttcaaatggaaacagttttggaaaggcttggccgaacaattcggcatcgaagaacatggcttttacgaagaggaagaaggtgaaggtcggctcagccttgtggaaatgatgaaaggtaaagaaggcgtgtgggaggaaattgtaaaagaaaatgaactgcagcccaccaaactcgaggaagtcggtgtgtggtggtttgccgattatgtactgggcggggaagcggtgctagactcaatgaataaatcgaaagagcacggcttcttaggttttcgcaattcttataaatcctttatctcctggattgaaaagatgaaaagctataagattgtaccc

SEQ ID NO: 1269 - DNA, 1173 bp, Sesamum indicum
atgagctggtggtgggcgggcgccgtcggcgccgccaaacagaaaaaactggaagaagatgaagcgccacaaaaacatgaatcagtagcgctgattatcggcgtcaccggcctggtggggaactcattagcggaaattctgcctctgtcggatacgccaggcgggccgtggaaagtttatggtgttgcacgtcgcccgcgccccagctggtccgatgactatccgattaactacattcaatgtgatgtgctgaatcgagatgacactcaggccaaactcagcaccttaaccgacattacccacgtattttatgcgacctggaccaatcgaccgacagaagcagaaaactgtgaggcaaatggtcgcatgctgcagaacgtgttagacgccgtcattccgaactgtccgaacctgaaacacatttgcatgcagactgggcgtaaacactacgtggggccgtttgaagcctttggcaaacttgaaacacagcttgaaacgccttataccgaagatatgccgcgcctgaactacattaatttttactacaccctcgaagacattctatgtaaggaggtggaaaaaaaagaaggcttgacctggtcagtccaccggcctggcacaatcttcggcttttcgccgcatagcatgatgaatttagtaggtacgctttgcgcatacgcggcgatctgtaagcatgaaggcaaggtattacgctttccgggctgtaaagaggcgtgggatgggtattcggattgctcagacgccgacctcattgcggaacatcagatttgggcggccgtcgacccgcacgcgaaaaacgaagctttcaacgtcaacaacggggatgtctataaatggaaacatctgtggaaagtgttagctgaacaatttggagttgaatgtggcgaacatgaagaaggtcagacgatcacgttcgagggtttaatgaaggataaaggcggcgtttgggacgaaatggtgcgcgaaaacggcctgacccctaccaagctggaagacgtagggctgtggtggtttgccgatgtgattctgggtaataaatgtttcttggacacaatgaataaatcaaaagaacatggctttctgggctttcgcaatagcaagaaaagctttatcagctggatcgagaaagtgaaagcaaataaaattgtgcca

SEQ ID NO: 1270 - DNA, 1185 bp, Panicum hallii
atgtcgtggtggtgggcgggggcggtcggcgccgcctggaagcgacgcggagatcgtgccgcgagtagcgagtcattccagtttcagtctgtggcgctcgtagtgggctcgaccggcatcgtcggcactagcctcgtggatattctgccgctccccgatactcctggcggcccgtggaaagtatatgcgctgagccgccgcccacccccgccttggttccaaccaccttccccgtcagtgacacacatccaggtggacctgacagattatagcgcggctgcggaggcgcttgcaccactcaccgatataacgcacgtcttttacgttgccctaagctggcgcccgactgaagcacagagcagggaaacgaattcagcgatgctgcgtaatgttctaagcgttgtagtatcgagttgtccgagactggcacatgtctcacttcagacgggtaccaagcactatttcggtcgtctgggatcaaaaacgcgagtgcatgatccaccatacacagaagacatgccgcgtctggacattccggtgttttattatgatcaggaagatatcttatttgataccgtggcgcgtcgggccggctggtccgtccataggccgaacctgatcttcggcttttcgccgcgctctgaggccaatgttgtgtgttctctgtgcgtttacgcggcgatctgtcataaggaaggagtgaaactgagatggccgggtagtcgtgcggcctgggagggctttaacaatggatctgacgccgatctgattgctgaacaacatatttgggccgccgttgacccaatggcaaaaaacgaagcatttaactgctcgaatggcgatgtgtatcgctggaaattattatggccggtcctggcgggtcgttttggcttagaatgggcaggctacgaaggggaggaaaatcgtttccaggtggcagaagccatggcaggcaaagaagcggtttgggcggccattgttaccgaaaacgaactggttgagacggaggtgaacgaagttgcctcttggtgggttattgatgcggtggcggaccagtttgggctcgatttggaaatcctggatagcatgaataagtcgaaagagcatggcttcctcgatttccgtgacaccgtaaaatcatttaatacgtggattgatcgcctgaaggcacaaaagattgtgccc

SEQ ID NO: 1271 - DNA, 1173 bp, Fragaria vesca
atgagttggtggtgggccggcgcggtgggtgcgcacaaaaaacggctggacggagaagatgcagggccacgcacgcctgttagcgtcggtttggttatcggcgtgacagggattgtcgggaattcgctggcggaaattttgccgttgccagatacgcccggcggcccctggaaagtttatggcgtcgcccgccgtccgcgtcctaattggaatgcagatcaccctgttgattatgtgcaatgcgatgttagcaagccaaatgatgtgaaagcaaaactggcgcccctgaccgatgttacacatattttttatgtgacctggacaagcaaagcgaccgaaagcgaaaattgtgaagcgaatgcggccatgctgcgtaatgtgctgaacgcgatgataccgaatgccccaaacctgaaacatatctgtctgcaaactggtggcaaccactatctgggaccgttcgatacatggggtaaaatacagccgcacgattcccctttcaaggaggatatgccgcgtttaaacgtccagaatttctattacacgatggaagacctcatgttcaaagaagtggaaaagaaagagggtatgagctggagtgttcatcgtccagataccatcctgtggttcagcccacatagtatgattaacattctggcaagcctgtgcgtgtatgcggcgatttgcaaacacgagggcatgcctttacgcttcccgggcaccaaaggggcgtggaactgtctgtctacggcaagcgacgccgatcttattgccgaacagcagatctgggcagcggtggatccgtacgctcgtaatcaggcttttaatatcaataatggcgatgtgtttaagtggaaacatttgtggaaagttctggccgaaaattttggcatcgaggaatgcggttttcaagaaaaaggcgagcgtgtgtcgcttcgcgaaatgatgaaaggtaagtccggagtgtggaatgaaattgtaaaaaagcatcaactggtaccgacgaaactggaacaggttggcgtgtggtggttcgtagacgcgatcttctctggcgaatgtatgtttggttgtatgaataaatcgaaggaacacggattcgtgggcttccgcaacagccgtaacagtctggtgacctggattgataaaatgaaagcgtataagattgttccg

SEQ ID NO: 1272 - DNA, 1095 bp, Setaria italica
atgtcgtggtggtgggcgggagctgtaggcaccgtccgcaagcgtcaagatgatctggcggcggtgagccaatcagaacaggcatttgaaagcgttgcactggtggtgggcagcacgggtattgtcggcgcgtcactggtggatatcctgttgctgccggatacgccgggcggcccgtggaaggtcctgaccccgctgattgatattacgcatgtgttttacgtagcgtggacctggcgtgccaccgaggaggaaaactgcgaggccaattcggcgatgcttcgtaatgttcttagcgtagttgttcccaactgcccggcccttgtccatgtatcgctgcagaccggtacgcgtcactattttggccgtctggactcggaaaactgcgtgcattaccctccgtatacggaagatatgccgcggctggatatgcctgtattctattacgatcaagaggacgtcctgatcgacgcggtagcacgccgcggcggaggtgcggtgtcgtggtctgtgcatagacctaacattatttttggtttttccccgcggtgtgcgatcaacctggtatgttctctttgcgtctatgccgccgtgtgctgcaaagaaggcacgccgctacgttggcctggctcacgtggcggttgggaaggatttattaccccgtccgacgccgatctggtagcggagcatcatatctgggcgggctttgatccgatggcaaaaaacgaagcgttcaattgcagtaatggcgacgtgtgcacctggaaaaaactgtggcccatcttggcgggccgtttcggccttgaatgggtgggctacgaaggcgaagaaaaacgtctgaaactggccgaagcaatggcgggtaaagaggccctgtgggccgaaattgttgaggaaaacgagttggtcgcaacacacgtgtccgaggtggcgaactggtgggtggtagacaagagtctggaccggtacgggttggagtgggatatcctggactcgatgaataagtcgaaggagcacggattcctgggctttcgaaatactttccgtagttttaacacctgtatcgaccgtctgaaggcgcataaaattgttccg

SEQ ID NO: 1273 - DNA, 1164 bp, Populus trichocarpa
atgtcgtggtggtgggcaggagacctgtcagcagcttggaaaaaaccggcggtccagggtggtcaggggagtgtagccttaattgttggcgttacgggtatcgtgggtaattcgctggccgagattttgcctcggtccgatacgccgggtggtccgtggaaagtctatggcgtcgcccgccgtccgcgccctaattggcatgaaaactgtccggtcgagtacattcagtgtgatattagtgatagtgcccttgcgaaaagtaaattatctcatttaaccgacgttacgcatattttttacgtgacttgggcatctcgctccaatgaagcagagaattgtaaaattaacggcttaatgttccgtaatctgctgcaagcggtagtccccatcgcgactaatctgcgccatgtaagcttgcaaaccgggaccaaacactacattggcccgtttgaaagcttttataatttcgagagccatgatccgccttatagtgaagacctgccgcgcctgaaggtggacaatttttactacaccctcgaagacgtgatgtttgaggaagttgcaaaaaaagagggagtcacgtggtcggtgcatcgtcctgacatcatcttcgggttcagtccgcattctttaatgaacattattgtaaccctgtccgtgtacgcggcaatttgcaagcacgaaggtgcgccattaatgtttccgggcactaaagaagcatggaactgctatgcgattgcgtcagacgccgatctggttgcggagcaggaaatctgggcgtgcgtggagcccaacgcgcagaatcaagccttcaacatccataatgcagactacttcaaatggaagcatttgtggaaagttttagctgaacagtttggtattgagaaatatggctttgaagagggggggaaacgcgctactttggctgagcgaatgaaagataaaggtccggtatgggaagagatcgttaaaaaaaaccagctgtttccgacgaaactggaggaagtggggggttggtggtacgtggataccatgctcagtggcgacgcgtttatcagttgtatgaacaagtcaaaagaacacggcttcctaggcttccgcaatagcacaaaaagcttcgtccattggatcggaaaaatgcgctcgcagaaagtaattccgaat

SEQ ID NO: 1274 - DNA, 1170 bp, Juglans regia
atgagttggtggtgggcgcgcgcaataggcgcggcgaagaagaaattagaagaagacgaacaaccacgcagctttcaaagcgttggcttagttattggcgtcaccggcatagtgggtaactcgctggcggaaatcttgcctttatgcgataccccgggcggtccgtggaaagtatacggcgtggcgcgtcgcccccgccctgattggaatgccgatcatccgatcgagtatatccaatgcgacgtaagcgatccggaagacactcaagcgaagctgagcccgttaacggatgttactcatattttttacgtcacttggaccacccgcccaactgaagcggagaactgcgaagcaaacaaagccatgtttagaaacgttctgctgactgttattccaaatgccccgtcgctgcgtcacgtctgcctgcagaccggcaccaaacaatacctgggcccctttgaatcctttcgcaaattccagactcacgatccccctttcacagaggaccttccacgtttggatgcgccgaatttctactataccctcgaagatgtgctgtttgaagaggcggataagaaggaaggtttaacttggtctgtgcatcgccccaattcgatctttgggttctccccctatagtctggccaacattattgggatgttttgtgtttatgcagctatttgcaagcatgaacgtgtgccgcttaaattcccgggtaccaaggcagcgtgggatggttactgggtaagcagcgatgctgacctcattgctgagcaacagatttgggcgtcagtggatccgaatgcgcgcaacgaagcctttaactgcaacaacggtgatgtgtttcgttggaaacacttgtggaaagtcttagcggaacagtttggaattgacgattacggcttagatgagggcgaaaaagttgtcagtttggtggagatgatgaaggataaggacgcggtttgggaggaaatcattcgtgaaaaccagctgcgcccacgcaaactggaggaagttggtatgtgggttctggtggacctgttatttggaggagaaagcccggtggactgcatgaacaaatcaaaagagcacggttttctgggtttccgcaatagcaaaaatagctttattagctggattgataagttaaaatcgtacaagattgtgccg

SEQ ID NO: 1275 - DNA, 1170 bp, Jatropha curcas
atgtcttggtggtgggcgcgtgccatcggcacggccagcaagaaaatcgaggaggatgaccgtccaccaaaatttaaatcggtcgccctgataattggcgtgaccggcatcgtggggaactcactggcggaaattttgccgctcgccgataccccaggcggaccgtggaaagtgtatggcgtcgcccgccggccgcaaccgatctggcaggcaggtcatctcaccgagcacattcaatgcgatatctcaaacgaagaagagacatttgagaaactgtcccacctgaaagacgtaacgcatattttttatgtcacgtgggcctcgaaaccaaccgaagccgaaaattgcaaaattaatggctctatgctgcaaaatgtcctcaagacggtcattccgaacgcgaaaaacctgcagcatatctgcttgcaaactggccagaagcactatttgggctcgttcgaaagcatcggcaaaattgtcccgcacgaatcaccgttccacgaagatctgccgaggttaaaagctatcaacttctactatactttagaagacgttctttttgatgaagtgtctaagcgcgaaggtctcacttggagtattcaccgccccgcggcgattttcggcgtttccccgtgttcattaatgaatgtcgtcggtacgttttgtgtgtatgcaactatttgcaaacataagggactgcctctgacctttccagggaatcagctcgcatgggatggctattggtacgccagcgacgcagacctgattgcggaacaccagatttgggcagccgtggatccgaatgcgaaaaatgaagctttcaattgctcaaatggcgacgtgtttaaatggaaacacctctggaaggttctcgccgagaaatttgaaattgataactatggatttgaagcgggtgataaaaaactgtccttagtggaacgcatgaaagatatgggccctgtatgggatgaaatagtgcgtgaaaaagagcttgttccgacaaggctggaagaagttggggcgtggtggctcatcgatttatttttccagggtgcagcatacttagatacaatgaacaagagcaaagagcacggattcgtggggtttcgcaactccaagacctgcttcgccagttggattgataaaatgaaaagccaccgtattgtgccg

SEQ ID NO: 1276 - DNA, 1176 bp, Hevea brasiliensis
atgtcctggtggtgggcacgcgcagtagaagccacgaaaaaaacctttgaacaagacgatgtgccaccaaagtaccagagcgtggcgctgattattggagtgacgggcattgtaggtagtagcctggccgaaattctcccatttgcggatactccgggaggcccatggaaagtctatggtgtggcacgccgacctcgcccgatttggcaggcgaaccatctgattgaacatatccagtgtgacatcagcaacgaacaagaaacccatgaaaaactcagcattttgacggacgtgactcacattttctacgtgacgtgggcgcgtaaaagcaccgaagcggaaaattgtcttgtaaacggcagcatgttgcagaacgtcctgaatgccgtgattctaaacgcgcgtaatctgcaacacatttgcctgctgaccggtcgtaaacattacatgggttcgtttgaatccatcggcaacattgcgccgaatgaatatcccctacacgaagatttgccgcgcttgaacgttattaacttctactatacgctggaggatttgttattcgaccaggttcgaaaaaaagaaggactgacatggtctattcaccgcccgggaatgatatttggtttcagcccgtttagccttatgaacaccctggggaccctgtgcgtgtatgcggcaatttgcaagcatcagggcctgccgttgattttcccaggtaatcatgtggcgtgggacggctactgtgacgcgtcggatgcggatctgatcgcggagcatcagatctgggctgcagttgatccgaacgcgaagaatgaggcctttaactgttcgaacggcgatgtgtttaagtggaaacacttgtggaacgtactggcagagcagtttgagattgagaactacggcatcgaagaggacggcgataaacgcctgagccttgctgaaatgatgaaagatatgggtccgatttgggatgagattgtcaaagagaagcagctcttcccgacccgcttagaagaagtggcaacgtggtggctactggacgttgtttttcaactggaagtttcacacttggatacaatgaacaaatcgaaagaacacggttttgtcggcttccgcaatagcaaaaaaagcttggtgcactggattgacaaaattaaagcgtataaaatcgtccct

SEQ ID NO: 1277 - DNA, 1167 bp, Camptotheca acuminata
atgtcttggtggtgggcgcgctcgctgggcgctcagaaggaatttaaagaaaatggagcgctgacgagctaccagtcggtaggattgattatcggtgtgaccggtatcgtcgggaattcactcgccgaaattctgccgttaccagatacgcccggtggaccgtggaaagtctatggcgtggctcgtcggccgcgccctgcatggaatacagatcacccgatcgagtacatccaatgcgatgtggcctccaccgaagatactctggcgaaattgagcccgttgaccaatattacgcatattttctatgttgcatggacgggtagtgaagattgcgaggtcaacgaaaccatgttccataacgttcttaaagcagtaatcccgaacgcgccgaatcttcggcatatctgcattcaaaccggcattaaacattatactggaccgcttgatccggatggcggcatccaaccgcatgacagcccctttactgaagatctcccgcgtctgaacgcgcctaacttttatcataatttggaagatatcttaatcgaagaagccgcaaaaaagaaaggtttaacgtggagcgttcatcgtccggccctggtatttggcttcagcccgtactccatgatgaacattattggtgcacttagtgtgtatgcggtgatttgcaagcatgagaataaaccactgatttaccatggggcccctgacaattcacgagactcttggaacgtttatgctgacgctgccgatgcggatttaatcgcagagcatcagatttgggctgctgtggattcgaacgcgaaaaatgaggtctttaactgttcgaacggtgatgtgtttaaatggaagcagatgtggaaaattttggcggaacagttcgaggtcgaactggtcgggtatgaagatggccagaaacgcatgagtctgcaggaacgcatgaagggcaaaggcccggtgtgggacgagatagtgcgcaaacacaaactgctgccgacgaaattagaagatgtggcgcagtggtggttcgcagatatcgtgagccagagccagaacctggtcaacggtgttaataaaagtaaagagaatggattcctcggctttcgtgattcaaaaaaatccttcgtttattggataaaaaaaatgcgcgcggcgaaaattatcccg

SEQ ID NO: 1278 - DNA, 1176 bp, Malus domestica
atgagctggtggtgggcgtcggccgtagaggcggcgaagaaaaagcatcaggaagaccgctacgaaccgccgagcatcccgaaatcagtaggcctggtaattggtatcacgggcatagtcggcaactctctcgccgaaattctgcctttatcagacacccccggcggtccgtggaaagtttacggagtggcccgacggccccgcccgcattggaacgcggatcatgccgtcgactacattcaatgtgatatttccgatccagatgacacccaaaaaaaactgagcaaactgtctgacgtcacccatattttttatgtgacctggacaaatcgaagcactgaaaacgaaaactgtgaagccaacgcagcgatgcttcgcaatgttctgcgtattgtgattagcaatgcaccgaatctgcgtcatgtgtgcctacagacgggaaccaaacaatacattggcccgtttgagactttcggtaaaatcgatcatcatgatccgccgtgcagcgaagaccttccgcgcctgaatgcaccgaacttctactacgcgcttgaagacgttttactggaagaggtaggaaaaaaagaagacattacgtggtctgtgcatcgcccgggtgtgattttcggattctcgccatacagtctcgcaaacatggttgccatgctgagcgtatatgctgccatctgcaaacacgagggtatgccgttgaaattcccgggtagtaaagaagcctggaactgctactcggacgcgagcgatgcggatctgatcgcggaacagcagatttgggccgccgttgatccgtacgccaaaaataaagcgtttaacgtgaataatggcgatgtctttaagtggaaacagctgtggaaagtgcttgctgaacagtttgaaatcgaggaatatggcttcgacgaagaaggcgaaaaactgagcctggccgaactgatgaaagttaaagaaggtgtttgggaacagatcgtgaaagaaaaccagctggaacccatgaaactagttgaaattggtcagtggtggctggtagatctggtgttcggcggggaagggttgatgacaagcatgaataaaagcaaagaacacggttttctcggttttcgcaattcaggcaactcatttgtgagctggatcgataagttgaaagcgtttaaaatcgtgccg

SEQ ID NO: 1279 - DNA, 1128 bp, Panicum hallii
atgtcatggtggtgggaacgcgccgttggtgaagtgagtaaacgccgcggagatcgcgcggctgctagccaccgcagtttccaggtgcaatcggttgcattggttgtaggcagcaccggcgttgttggcgcgagcctggtagatattttaccgcagcctgataccccggggggtccgtggaaagtttacgctcttagcccgagaccgcctccgccttggtatccgtcccgttcaccgagttcagtcacccatgtgcacgttgatctgacggattctccggctgttgccgaagcacatgcgccgctgacggacataacgcatgtgttttacgtagcctggagcagccgaccaacggatgctcagaaccgtgaggcgaatgctgcgatgcttcgcaatgttctgtccgccgtagttcctacctgcccggcgttagcccacgtgtgcctgcaaacaggtacgaagcactacgttggttcgttcgaagccattggccgagtcccgcttccggaaccgccatatacagaagacatgccacgcctggactgtcccgatttctattatgaccaagaagacattctggtggatgcggttagtcggcgcggcggcgtgagttggtcggtccaccggccgcgactgatcttaggcttcgccccgcgcagtgccatgaatgttgtctgtagcctctgcgtgtacgccgccatatgccgatcggaagacgtccgggcagttgtgcgctggccggggacgcgtggcgcctgggagggttttgataacgcaagcgatgcagatctggtatccgagcagcagatttgggccgctgttgatccgatggcaaaaaatgaggcctttaactgtagcaacggtacagccggtatggaagatgttcgtgcagtgatcgcgaaagaaaatgaacttgtcgaaacgcagctgaatgaagtggcgtcttggtggctggttgaagcgcagttttgccagttcggcgccaaccgcgccttcctggattcgataaacaaaagcaaggaacatggctttctgggctttcgcaataccgtgaaaagctttaacacctggattgacgaaatgaaactacataagatagttccgcgctgtctctttatgatgttcatt

SEQ ID NO: 1280 - DNA, 1173 bp, Arachis duranensis
atgagttggtggtgggaacgttctacaggtgcggctgccaaaaacatatctaatgaaattgacgagagcagccaaaatttacaaaatgttgctctgatcattggagttactgggattgtgggtaatagcctcgctgaaattttaagcttacagaacacgcctggtggtccgtggaaagtatatggcgtagcccgacgtaatcggcccgcgtggaatacaaaccacccggttcattacgtgcagtgtgatatttcaaacccaaacgatgtggcactcaaactgagtccgcttacggacgtaacccatattttttacgtgagctggaccagcaagagtacggaagcgcaaaatattgaagttaatggcagtatgtttcgtaatgtgttaaacgcactgatttcgaacgccccaaacttgcgccatgtttcactccagaccggcgtgaaacactatgtgggcccgttcgaactgtttggaaagatcaaagcaaatgagccgccatttaccgaagacctgccgcgtgttaatgcaccgaatttttactatacgcaagaagacattctgttcgaaatggcgcagaaaaaggaaggtttgacctggttcattaaccgcccgcaagttatatttggctttagcccgtactccctgatgaacctgattggcacgttatgtgtctacgccgccatttgcaaacatgaaggcgtgctgctgagatttccgggcaccaaggccgcatgggaatgttacagcgcggccagtgacgcaaacctgatcgccgaccagcacgtgtggggcgcggtcgatgcgcgggcccgtaacgaagcctttaatgtctcaaacggtgacgttttccgctggaaacatctctggaaagttctggccgagaaattcggtatcgaagaatatggattcgtagaaggcagctcattacgcctctctgacttaatgaaagacaaagggggcgtatgggatgagatcgtgaagaaaaacaatttgcaagccacgaaattggaagatgtaggcgattggtggtttgctgatatcatcctgggcatggaagcggtgctggataacatgaacaaggccaaggagcatggcttcctgggttttcgtgactccaaaaaatcatttattaactggatcgaacgcacgaaagcctacaaaattgtaccc

SEQ ID NO: 1281 - DNA, 1164 bp, Catharanthus roseus
atgtcctggtggtggaaacgttcaatcggagcgggcaaaaaccttccgaaccagaataaggaaaatggagtttgcaaaagctataagtccgttgcacttgtggtgggcgtgactggaatcgtgggcagtagtcttgcggaagttcttaaactgccagacacaccgggcggcccatggaaagtgtacggcgtggcgcgccgcccgtgccccgtgtggctggccaaaaagcccgtagaatacatacaatgtgacgtgagtgataatcaggaaaccatcagcaagctgagcccgttaaaagatattacccacatattctacgtgagctggattggctcagaagattgtcagaccaacgcgaccatgtttaagaacattcttaacagcgtcattccgaacgccagcaacttacagcacgtgtgtctgcagaccggcattaaacattattttggcatttttgaagaaggaagcaaagtcgtgccgcatgatagtccgtttaccgaggatctgccgcgtctaaatgtgcccaatttttaccatgatctggaggacatcttatatgaagaaacaggtaaaaataacttgacgtggtcggtgcatcgtccggccctggtgtttggtttctcgccgtgctctatgatgaacattgtctccacattatgcgtgtacgctaccatctgtaaacatgagaacaaagccttagtctaccctggcagcaaaaattcgtggaactgctatgctgatgcagtggatgccgatctggtagcggaacatgaaatctgggcggccgtagacccgaaagccaaaaatcaggttctgaattgcaacaatggtgacgtgttcaagtggaaacacatctggaaaaaattggcggaagaatttggaattgagatggtcgggtacgtggaaggcaaagaacaagtatccctggcagagctgatgaaagataaagaccaggtgtgggatgaaattgtaaagaaaaataatctggtccctacaaaactgaaggagattgccgctttctggttcgcggatatcgccttttgcagtgagaacttaatctcaagtatgaacaagtccaaagaacttggtttcttagggttccgtaatagcatgaagagtttcgtatcgtgtattgataaaatgcgtgactatcgctttattccg

SEQ ID NO: 1282 - DNA, 1185 bp, Spinacia oleracea
atgtcatggtggtggctcggtgccattggctcaagcctacacaaaatcgaatcaggtgatattccgagcaagtatcacaacgtggcgttggtggtcggcgtgaccgggatttcgggtaacagccttgcagatattctgcaacttagcaccatcccgggaggccgctggaaagtttacggtgtcggccgccgccgccagccggagtggcagttccatcacaatcatgttcagtacattcagtgcaatatggtggacccggaggattgtcaggccaaacttagccatctgagcgatgtgacccacattttttacgtagggtgggtcaccaaacccaccgaacaggaatccagtgacgaaaacggcaaaatgctgcgcaacgtgctcaacgcagtgatcccgaatgcccccaatttgaaacacatttgcttacagaccggtcaaaaatatgccttaccgtgcctagatagttcagccgaaattcagcacgagccgcagtttgtggaggaatttccacgcgaagatatcacggatagctattacgctatggaagacatcctggatgaagaggtacagaagaaagaaaaattaacttggagcgtccaccgtcctgctgtgatgtttggcttttcaccgtatagcacccgtaacatcgtgggaagcctctgtgtgtacgccactatctgtaaacacgaagggcagccgttacgctttcctgggaaccaggcggcgtgggatggttactctgaagcgggggatgcggatttggttgcagaacagcagatctgggcgagtctggacaataagggaaaaaaacaagcttttaattgttcaaatggtgatctgtttaagtggaaagacctgtggaaagttttagcggaagagtttgaggtgaaatttctggagttcgaggaggagtcaaactcactggaagaaatgatgcgtgaaaagggccctgtgtgggatgaaattgtacaggaaaaagatctgctgcccacaaaattagaagaagtcggcacatggtggtatgtcgacagtatcctgaggagcagtgaagccgtgctcgatagtaacaacattagccgcggcatggaaaaatcccgcaactacggtttcggcggctcacgtgaaacggcggaaagctttcgcttctggatagaacacacacgtcgatacaagattattccg

SEQ ID NO: 1283 - DNA, 834 bp, Trifolium subterraneum
atgagctggtggtggtccggtgccattggcgcggcgaaaaaaaagttcgatgaagatgaagctcctcgctcattccagagcgtagggttagttatcggtgtgacgggtattgtgggcaacagcctagcagagatattgccgttaccggacaccccggggggccggtggaaggtgtatggggtggcccgccgtcctcgcccatcctggaatgcggatcatcctatcgaatatattcagtgcgatattaccgatccgaatgacacccaaacaaaattaagcgtgttaacggatgtaactcacattttctacgtgagctggaccaatcgtcctaccgaagccgaaaactgcgaggtaaatggtgccatgttgcgtaacgtcttacgtgcggttattcccaacgctcccaacctgcgccatgtcagcctacagactggtggcaagcattatttgggcccatttgatctaataggaaaaattaaaagtcatgagccgccgtttaccgaagacctgccgcgcttggatgcaccaaatttttactatacccaggaggacattctcttcgaagaaacgaaaaaaaaagaaggtctgagttggtccgtccatcggccgcaggtaattttcggattctcaccatattcacttatgaacatcgtaggaacgctgtgcgtatacgctacaatctgcaaacacgagggcgtgccgttacgtttcccgggtgaaggtaccgtggatatcatgaataaagccaaggaacacggtttcgtaggttttcgtaacacgaaaaactcgctgatttattggattgataaaaccaaaggatataagatcgtactg

SEQ ID NO: 1284 - DNA, 1170 bp, Ziziphus jujuba
atgtcttggtggtggtctggagctattggggccgcaaaaaaaaaatttgacgaaattgagacccccatctcataccaaagcgtcggcctggtcatcggcgtgaccggcatcgtaggaaactcattagcagaaattctgccgttatcggatacgccgggcggcccttggaaggtgtacggcgtagcccgtcgtccgcgccctgactggaacgcagatcaccctgtcgagtacattcaatgtgatatcgccgacgcagatgatattaataaaaaactgagtgatttgaccgacgttacccatttattctacgtgacgtgggcgaaccgtagcactgaagaggaaaactgcgaggttaacggtacaatgttccgtaatgtgctgcgtgccgttattccaaacgcccccaagctccgtcatatctgtctgcagacgggtactaaacactataccggaccgtttgaatcccgcggcaagcaggagcatcacgatccgcccctcacagaagacttgccccgactgagtggaccgaacttttactacacactagaggacgttctgtatgaggagactgaggacaaaccgaaccttacctggagcgttcaccgtccgaacacgatctttggcttctcacccttcagcttaatgaacatcattggaacattgtgcgtatatgccgccgtgtgcaagcacgagggcgtgccgcttaaatttccgggtaaaaaagccgcttgggatagctactcagtggcgagcgatgccgatcttgtggcggagcagcagatttgggcagccgttgacccgtatgcgcggaacgaggcctttaactgcaacaacggagatgtattcaaatggaaacacctctggaaggtgttagccgaacagttcggtattgaaaactatggcatcgaagagggcgattcgcttagcttggtggattgggcaaaaggcaaagagaacgtttgggaggaaatcgtccgtgaaaaccagctgcaacccaccaaattagaagaactcggcgtttggtggtttgcggacctgattttgggcgaggaagctctactggacagcatgaataagagcaaggagcatggctttatgggctttcgcaattcgcgtaactctttcattagctgggtggataaatttaaagcctacaaaattgttccaaac

SEQ ID NO: 1285 - DNA, 1167 bp, Medicago truncatula
atgtcttggtggtggagcggcgctattggcgcggccaagaaaaaactggatgaagatgaagccccgcaatcttttcagaacgtagcactggtggtgggagtaactggaattgtaggaaactctctagcggagatattaccgcttgccgacaccccgggcggccgctggaaagtatatggcgtcgctcgccgtccgcgcccgagctggaacgccgaccatcccatcgaatatattcagcgcgatattactaactcgaacgatacacaaactaaattctccatcctgacagatgtgacccatatcttctacgtgagctggacctcacgtccgacggaagaggacaactgcgaagtgaatggggttatgctgttaaatgtactgcgtgccgttattccgaacgccccgaacttgtgtcacgtaagcctgcagacgggcggcaaacattatctaggtccgttcgcgctgattgataaaattaacagtcacgaaccatcttttactgaagatttaccgcgtctggatattccgaacttctactatactcaagaagatatcctgtttgaagaaaccaagaagaaagaaggtttaagttggtcagtgcatcggcccttgcttattttcggcttttcgccgtatagtctgatgaatgtggtcggcacgctgtgcctgtacgcggcgatttgtaaacatgaacacatttcgctgaaattcccgggaacgaaacgcgcttgggaatcatattatatggcgagcgatgccgatctcattgccgaacagcatatctgggctgctgtggacacctacgcaaaaaacgaagccttcaattgctccaatggagacgtgttccgttggaaacagttgtggaaagtattgacggaacagttcgagattgaagagtacgggtatgaagatggtccacgcctccgcctggccgaaatgatgaaagacaaaggcccggtatgggacgaaattgttaaagaaaatgagttacaaccgaccaaactggaggaggtagccgaatggtgggtggcagatgccacctttggtatggaggatatagttgattccatgaacaaagccaaggagcacggctttctaggttttaggaatagtaaaaactcgctgataaactggattgacaaaacccgtgcctataagattgtgccg

SEQ ID NO: 1286 - DNA, 1170 bp, Medicago truncatula
atgtcgtggtggtggagcggcgcaattggagctgcaaaaaaaaaactggatgaagatgaagcgccacgtagttttcagaatgtcgcgctggtggtgggtgttactggcatagtgggtaatagtttggcggagattctgccgctcgctgatacgccgggcggtcgctggaaggtgtatggcgtagcccgccgaccccgcccgtcctggaacgccgatcacccggttgaatacatccagtgcgatatcacggatccgaatgacgcaaccactaaactgtcagtgctgaccgatgtcacacatgttttctatgtttgctgggccagccgtcccacagaagcggaaaactgcgagatcaatggtacaatgttaaaaaatgcgctcactgcggttattcctaatgcacctaacctgcgccacgtcagtattcagaccggaggcaaacactatgtggggccgtttgagagcttcggcaaaatcaaataccatgaaccgccgtacacagaagatatgccgcgcctggattatcataatttctattataccttggaagacgttttgttcgaggaaaccggcaaaaaagaaggggttagctggagtgtgcatcgcccgctgctgatctttgggttctcgccttatagtatgatgaacattatcggcaccatttgtgtatacgccgccatatgcaaacacgagggtgttccgctgcggtttccgggaacgaaattagcttgggaaaattactacatggcctccgacgccgatctgattgctgaacagcatatttgggccgccgtggacccctatgcgaaaaatgaagcttttaattgctccaacggcgacgtttttcgctggaaacagctgtggaaagtcattgcagagcagttcggcattgaggagtatggtttcgatgaagaaggcccgcgtttaaaattgactgaactgatgaaggataaagggccggtgtgggatgaaatcgtgaaagagaacggattacaggtgaccaagctggaagaagttgcggaatggtggtttgccgatgcgtgcttcggaggcaatggttttactgattcaatgaacaaaagcaaagagcacggattcctgggctttcgcaatactaaaaactccctcattaattggatagaccgcacccgggcctataaaatcgtacct

SEQ ID NO: 1287 - DNA, 1170 bp, Medicago truncatula
atgtcctggtggtggagcggcgccattggcgccgcgaaaaaaaaacttgacgaagacgaagcaccgcgaagctttcagaacgttgcgctcgtcgtgggcgtcaccggcattgttgggaatagccttgccgaaattctcccacttgcggatacgcctggtggccgttggaaagtatacggcgttgcccgtcgctcgcgccccagttggaatgcggaccatcctgtggagtacattcagtgtgatattaccgatccgaatgatgcaacgactaaattatccgttctgacagacgttacccacgttttttacgtgtgttgggcgagccgccctactgaagccgaaaactgtgagattaacggggctatgctgaaaaacgtgctgacggcggttatcccgaatgccccgaacctgcgccatgtctcgatccagaccggtggtaagcattatgtagggccctttgagtcgtttggcaaaattaaataccacgaaccgccgtacaccgaagatatgccgcgcctggattatcacaatttttactacacactggaggacgtgctttttgaagagaccggcaaaaaagagggtgtgagctggagtgtccaccgccctcttctgatttttggtttcagcccgtatagcatgatgaacatcattgggacaatctgcgtttacgcagccatctgcaaacatgagggagtgccgttacgctttcctgggacgaaactggcctgggaaaattattatatggccagcgacgcggatctaattgccgaacagcatatctgggccgcagtggatccttatgcaaagaacgaagcgtttaattgcagtaacggtgatgtgtttcgttggaaacagctgtggaaagtgatcgcggaacaatttggcattgaagaatacggttttgatgaagaaggcccgcgtttgaagctgacggagctgatgaaagacaaaggcccggtctgggatgagatcgtcaaagaaaacggactgcaggttaccaaactggaagaggttgccgagtggtggttcgcggacgcgtgttttggcggtaatggttttaccgacagcatgaacaaaagtaaagagcacggttttctgggttttcgcaatacgaaaaacagcctgattaactggattgatcgtacgcgtgcgtataaaattgttccg

SEQ ID NO: 1288 - DNA, 1194 bp, Spinacia oleracea
atgagttggtggtggtcgggtgcaattggcgcggcgaaaaaaaaactcgaagactcggatgaagggagctcgtcgtcctctcgtaattaccagtcggtagccctgattgtgggtgtgacgggcattgtgggcaattccctggctgaaattcttccgctttcagatacgccgggtggtccgtggaagatttacggtgttgcgcgtcgtccgcggccggattggaattcagaccatccaattgaatacatccaatgtgacatcagtgacgagaacgacgcggtgtcgaaattgtcacctctcactgatattaccaacatcttctacgtgtgttggggcaaccgcgattctgaagccgaaaatcgtgaattaaactccaaaatgtttcgcaatgtgctgaattctactatcccgaacagcccgaacctaaaacacatttgcctgcagactggcatgaaacactacattgggccctttgaatcttggggtaagaaaattgaccatcagcaccacgatccgccattcaatgaagatatgccgcgtctggacattccgaacttctactacgacctggaggacattctgtttgccgaaattgccaaaaaagagagcctgacctggtccgtgcaccgtcccggcagcatctttggctttagcccatatagccttatgaacgttgtaggtagcttatgcgtttatgccgctatttgcaaacatgagggtgtacctctgcagttccctgggaccaaggccagctgggaatcttatagccaggcgtcggatgccgatctgattgcagaacatcaaatttggaccagcgtagatccctacgccaaaaatgaagcattcaactgtagcaatggagatgtttttaaatggaaacaactgtggcgtgtcttgggcgagcagtttgaagtggaaatcgctgacttcgatgaagacggtgaacgcttttcaattgaagaacgcatgaaaggcaaagaaggagtgtgggaagaaattatccgagagaatggcttagttgcgaccaaactagaagaagtcggcagctggtggtttttagacaaagcgtttgacggcgagtggcatctcgacacgatgaacaaaagcaaagaacacgggtttttgggttttcgcaacactaaaaactcgtttgtgagctggatagacaaaatgaaagcatataagattgtgccg

SEQ ID NO: 1289 - DNA, 1167 bp, Juglans regia
atgtcatggtggtggtccggcgccattggcgcggctaaaaaaaaaagcgataaccgtgattcaccgccccgctaccagagtgtggccctgattatcggtgtgaccggtatcatcggcaattcattggccgaaatcctcccacacagcgatacccccggtggcccgtggaaagtctacggcgtcgcccgtcgcccccgcccggcttggtcagccgactacccgattgaatatattcagtgtgatattcttgatgcgcaagaagctcagactaaactgtcgaagttgaccgatgttacacacattttttacgtggcgtgggccaacatgcaagatgaagcagataattgcaaagtaaacgcggatatgctccgtaacgtgctgaatacaattattcctaaagcgcctaatctacaacatatctgccttcagacgggccgtaaacattacgtggtggcaccggaactatttgagattgtgaaaccgcacgaacctccgttccatgaagacctaccgcgcctgaacgtcccgcatttctactactcgctcgaagatgtgctgttcgagcaagtagccaaagaagaactgctgacgtggagcgtgcatcgccctggcgtcattttcggcttttcgccccgcagcctgacgaacattgtgggcagtttgtgcgtttatgcggcgatttgcaagcatgaaggtgaacagctgaggttcccaggcagcctggcagcatgggaaggctattgggatgcgtcagatgcagatatggtcgccgaacaccaaatttgggcagcggtggatagcaacgcaaaaaacgaaagctttaattgcagtaatggcgacttgtttaaatggaaacacttttggaaggtgttggccgaacgcttcggggtggagtgcggtaagtttgatgagaattcgaacctgagcctccaggaaatgatgaaaaataaaggacccgtatgggaagagatagttcgcgagaagggcctcatgccgaccaaattggaacaggtgggtacatggtggttcgttgatgaagttctgggtgcagaaagcttcttggactctatgaacaagtcgaaagagtacggatttgttggctttcgtaacagcaaaaccagcttcaactattggattgataaaatgcgcgcccatcgcattgtcccc

SEQ ID NO: 1290 - DNA, 1173 bp, Populus tremuloides
atgtcttggtggtggtccggggccattggcgcagcgaaaaagaagaccgaagatgatgaagcgagccgcggttatcctagtgtcgctctgatcttaggagttacgggtattgtgggtaattcactggctgagatcttacccctgtctgatactccgggcggcccgtggaaagtatatggcgttgcgcgccggccgcgcccgaattggaatgaggatcacccggtggaatacattcagtgcgacattagcaatactgcggagacgcaaagcaaattgagcaaattgacagatgttactcacgtcttctacgtcacctgggcgtcgaagtcgaccgaagaagaaaactgtgagattaacggactcatgtttcgtaacgttctgcaggccgtgattccgaacgccgctaatctgcgtcacgtatgcctgcaaaccgggggcaaacagtatgtgggcccgtttgcactgctgggcaagatcgaagcgcatgacccacccttcaccgaagacttaccgcgcctgaacgacttcccgaacttttactatacgctagaagatgtaatgtatgaagaggttgcgaaaaaagaaggcgttacgtggagcgtgcatcgcccggacattatctttgggttttcaccccatagcctgatgaatctgatcgtaacgatatcggtttatgcggcaatttgcaagcatgaaggtgcacccttgatctttccgggaaccaaggaagcatggaacggttacgcgatcgcaagtgacgcgaacctgatcgccgagcatgaaatctgggcctgtgtggaacctaaggccaagaatgaagcgtttaacattaacaacggtgatttattcaaatggaaacacatgtggaccgtgctggcacaagaattcggtatcgagaagtacggcttcgtggaaggcgaatctagcgttacctttgccgaaaaaatgaaggacaagggcccggtgtgggaggagatcgtgaagaaaaatcagttattaagtaacaaattagaacaggtgggcggttggtggtttggtgatttgatttttagcggcagtggctatgtagcctccatgaacaaagccaaagaacacggctttctgggatttcgcaattctaagaaatcattcgtcagttggattcataaaatgagggcgtacaaagttgttccg

SEQ ID NO: 1291 - DNA, 1023 bp, Vitis vinifera
atgtcctggtggtggtcgggtgcgattggcgcggcaaagcgcaaactccaggaagatgaagcccatccaaccaactatcagggtgtgggcctgatcgtaggcgttacagggattgtgggcaacagtctggcagaaattttaccgttacgcgataccccgggcgggccctggaaagtctatggggttgcccgccgcccgcaaccggcgtggaatgcggataactgtgtggaatatatccagtgcgacgtgtttgatccggaagagaccagctcgaaattaagcaagctgaccgatgtgacccacatcttctatgtgacctgggccaacatgggctcagaagcagaaaattgtcgtcacatctgtctccaaaccggtcgtaaacattatatcggcccgtttgaagcccttggaaaaattgaaccccatgacccgccgtatcacgaggaaatgccgcgcctcgacgtggaaaacttctatcacgtgcaggaggatattttatttgaagaagttcgaaagaaagaaggactgacgtggtcagtacaccggcctggtgtgatcttcggcttctctccatatagcatgatgaacgccattgggacgttgtgcgtgtatgccaccatctgtaaacatgagggtttaccgttgcgattccctggtacccaagacacgtggaacggctactgggacgtgtctgatgccgacctcatcgccgaacaccatatttgggcagcagtagacccatttgcgaaaaacgaagcctttaattgttccaacggcgacgtatttaaatggaaacatctgtggaaagtactggctgaacaattcggcctggaagagaagggcctagtgccgactaaattagaagaagtaggtcagtggtggtttgcggatgtggttttgtcggcgggtagtagcctggatagcatgaataaaagtaaagaacatggatttctggggtttcgtaattctaagtcctcgttcctgtcgtggatcgacaaaatgaaagcatacaagtttgtgcct

SEQ ID NO: 1292 - DNA, 1167 bp, Vitis vinifera
atgagctggtggtggagcggagcaattggggcagcgaaacgcaaactacaagaggatgaggcacacccgacaaattatcagggtgtgggtctgattgttggcgtgactggtatcgtaggtaacagcctggcggaaattcttccgttgagggatacgccgggtggcccgtggaaagtttatggtgtggcgcgtcgtccgcagccagcctggaacgcggacaattgcgttgaatatatccagtgtgatgtattcgatccggaagagaccagctctaaactgagcaagctgaccgatgttacccacatcttttacgtgacctgggcaaatatgggttcggaagcggaaaactgcagggtaaacggcgatatgtttcgtaatgttctctcagccgttattccgaatgctccgaacttacaacatatatgcctacaaaccggaagaaagcactatatcggcccgtttgaggctctagggaaaatcgaaccgcatgatcctccctaccacgaagaaatgccccgcttggatgtggaaaatttctaccacgtgcaggaggatattctgttcgaagaagtacgcaagaaagaagggctgacctggtctgtgcatcgtccgggcgtgatttttggtttttcgccgtatagcatgatgaatgcaatcggcacgctttgcgtgtacgcaacgatctgtaaacacgagggactgcccttgcgcttcccgggcactcaagatacttggaatggctattgggatgtgagcgacgcggatctgattgccgaacatcacatatgggcagcggtagacccgtttgcaaaaaatgaggcgtttaactgtagcaatggagatgtgtttaaatggaaacatctgtggaaagtgttagcagaacagtttggccttgagttccacgaaccggaagggcaaggcctgtctctggagaaaatgatgaaggacaaaggtccagtgtgggatgagattgtacgcgagaaaggactggtgccgacgaagctcgaggaagtgggacaatggtggtttgcggatgttgtactctcagcgggtagctcattggatagcatgaataagagtaaagagcatgggttcctgggattccgcaactccaaatcctcgttcttgagttggatcgacaaaatgaaggcgtataaattcgtgcca

SEQ ID NO: 1293 - DNA, 1161 bp, Daucus carota
atgtcttggtggtggtcgggcgcgattggtgccgcccgcaaaaaactggaagaaaccgaggcccctccaaaatacgaaagcgtagcgcttgtgatcggcgttacaggtatcgttggaaattcattagccgagattctgccgctgagcgatacaccgggtgggccgtggaaagtatacggcgtggcacgtcgtccgcgaccatcatggaatgccgatcatccgattgaatatatccagtgcgacattagcaatactgatgaagcacagagcaagctgtcccaactgacggacgttacccacattttttatgtgacttggtcctcaaaaccgtccgaagcggagaattgcaaatcgaatggtcatatgttccgcaatgtcttgaatgccgtaattccgaacgcaattaatttaaaacatgtctgtctccagacaggccgtaaacactatctgggcccgtttgaattatatggcaaagtagcgcacgatccgccgtatagcgaggatttgccgcgcttgaatgttgagaacttttattatacattggaagatattctctttgaagaggtggaaaagaaagaaggcttgacatggagcgtgcatcggccaggcaatatttttggtttcagcccgtattctatgatgaatttaattggaacgctgtgcgtgtatgcaaccatttgtaaacatgaaggcgtcccaatgcgcttcccgggcgcgaaagccgcctgggagggttacagcgatgcaagcgatgccgacctaatcgcggaacatcaaatttgggcgagcgtggatccgtacgcgaaagatgaagcatttaactgtagtaacggtgacgtttttaagtggaagcatctctggaaagtattcgaagagcagtttgaagtgaaatgcgcggactttgaaggcgagggtctgtgtctggttgatctgatgaaagataagggcccggtatgggatgaaattgttaaagtcaatggtttaaccccgacgaaattagaagatgttgccatctggtggttcgtggatatggttttgggcatcgaatgccccttagacaccatgaataaatccaaagagcatggttttttaggcttccgtaactcaaaatcctctctgatcacgtggatcgatcgcatgaaggggtacaagattgtgcct

SEQ ID NO: 1294 - DNA, 1197 bp, Dendrobium catenatum
atgagctggtggtggtcgggcgcgatcggtgccgttaaaaagaaactggatgatgactttaacgccgcggcgggcaaatatccgtcggtaggtctggttatcggtgcgaccgggatcgtggggatgtccctggtggaaatcttgccgctaccggatacaccaggtggcccatggaaagtgtacgcagtgagccgccgaccgcgcagcagcctgctgccgccgccgtcggatggtttcgccgtggaaaccgtactgtgcgacatttccgatcctgcggacgcgagggccctgacgaagttgagtccgctgaccgatgtaacgcacctgttttatgtcgcgtgggcgaaccgcgaaagtgagacggaaaacatcgccgcgaacacggcaatgttgcgtaacgttctggacgtagtcgtgcctagcgctccgaacctgcagcatgtctgcctgcagacgggccgcaaacactatattggaagctttgattccctgggtaaggtgaaacctcatgacccgccgtttcacgaagatctgccgcgcctgccggcccccaatttctattacacgcaagaagatattctgttcgatagtcttcgcagtcgagatggcgccgtgacctggtccgttcatcgcccgacagcgattttcggctttgcaccgacctccctaatgaacattgtcggcaccttatgtgtttatgcgaccatttgtaaacgtgaaggcgagcctttacggtggcctggctcgcgcattgcgtgggaaggtttcagcgatgcctccgatgccgatttaattgctgaacaacatatttgggcggcagtagacccgtacgcgaagaatgaagctttcaattgctctaacggcgatgtgttcaaatggaaacatctctggaccaccctagcggaacaatttgaattagaggccgtgggatatattggagaagtcgaacgctttaagctggaagcagcgatgaaaggtaaggaggaactctgggaaaaaatcgtgcaagagaatcatctggtcccgacgaatcttgaagaagtgggcaactggtggtttgtggatattatgctgaacaatgaagaacacctggataccatgaacaaatcaaaagagcatggctttctaggattccgtaataccagaaatagcctgattagctggattgataaaatgaaaggttataaaattgtcccg

SEQ ID NO: 1295 - DNA, 1167 bp, Passiflora incarnata
atgtcatggtggtggtctggcgcgatcggcgcggttcgcaactcggaacagaacgacggcccgcgtagcttcgaaagcgtagccctggtagttggcgtgacaggtatcgtgggcaacagtctagcagagattttacccctcgcagacactccgggaggtccgtggaaagtatatggcgtcgcgcggcgtccgcagcctgattggaacgccgaccatccggtggaatatatccagtgcgacattgcagattcaaatgatgtgcagacaaaattgagtaaattggttgacgttacacatattttttacgtcacttgggcgaatcgtagcagcgaggcggaaaactgtcgcgtgaactcgctaatgctgcgtaatctgttggaagctctgattcctaacgccccaaacctgcgtcatatttgcctgcaaacgggtaccaagcactatgtaggtccgttcgagttagttctgcaacttgaaacccacgatcctccgttcactgaagatactccgcgtctgaacgcgcctaatttctactacaccttagaggatatcctgttagaagaatcaaagaaaaaggaaggcctgacctggtcgatccaccgtccggatattatcttcggctttagtccatacagtttaatgaatataatcggaagcttgtgcatttatgccgcaatttgcaaacatgaaggccagcctttactgttcccgggtactaaagaaagctgggaaaactatgcagtggcgtcggacgcggacttaatcgccgaacaggaaatctgggcgtgtgtggacccgaacgcacacaacgaggtcttcaactgccataacggcgatctgttcaagtggaaacatctctggaaagtgttggcggagcaatttgaaattgagaaatacgggttcgaagaacgcgaaaaacgtgttacgttagaagagcgtatgaaagataaaggcccggtttgggatggaatcgtacagaaacatcagctttcgagcacgaaacttgaggaaattggtgcgttttggtttccggacatcatcctgggtggctggagcaacatctcgtgtatgaataagtgcaaagaacacggtttcttcggtttccgtaatagcaagaattcctttatttcttggatagataaaatgaaagcatataaaatcgtgccg

SEQ ID NO: 1296 - DNA, 1182 bp, Prunus avium
atgagctggtggtggtctggcgcggtgggggctgccaaaaaaaaattcgatccgaacaacgcgccgaccaagtacgaatcagtagcacttgtggccggtatcaccggcatcgtgggcaacagcctcgcggaaattcttcctctgccggacaccccgggcggaccatggaaagtgtacggcgtggcacgccgtcctcgtccggactggaatgtagatcatcccgttgaatacattagatgcgatcttagcgatcctcatcagacccacagtgaactgtctcagttaaccgatgtgactcatatcttttatgtcacatgggcatcaaaaccaacagaagtggaaagctgcgaggcgaatgggaacatgttccgcaatctgctggatgcggtgattccgaatgcccctaatcttcagcatatttgcttgcagaccggacggaaacactacattggaccctttgagaagtggggcaaagtggaaccacatgaaccgccctttgacggcgatcttcctcgtctcaacgtgccatgcttttattacacgctggaggatatcctgtttgaagaagtcaagaaaaaagagggcctgacgtggtctgttcaccgtccgtccgttatttttggattcagcccgtacagtctcatgaatattgttggcaccttttgcgtttacgccgcaatttgtaagcacgaaggcaaaaagaaactgaaatatccggggagcaaaggcttttggaatggatactgggatgcgagcgatgctgacctcatcgccgaacatgagatctgggcggcggtggatccgtacgcgaagaacgaggcctttaattgctctaacggggacctgtacaagtggaaacatctatggcgcgtgttagcagagcagtttgacatggaatttgaggattttgacgatgatgatgagggcggtagccgtcctagcatgggtgaaatgatgaaagacaaaggcccagtatgggacgaaattgtgcgcgaaaacgggcttgtccccaccaaactggaggaaattgggaactggtggtttgtcgatgtgatgtttggcatcgagagctcggtggattcaatgaacaaaagtaaggaacacggcttcgtcggtttcagaaatagtaaaaccagcttcgtgacctggatagacaaaatgaaatcttacaaactcgtacct

SEQ ID NO: 1297 - DNA, 1164 bp, Daucus carota
atgtcctggtggtggagtggcgcggtgggtgcggcgcgtaagaccctgaaccaagataaagtaccttcgagttacgaaagcgtggcgctggtggttggtataacgggcatcgtgggcaacagcttggccgaaattctgccgctgcctgatactccgggcggcccttggaaggtgtatggggtggcgcggcgaccgcgccccccgtgggatgccaatcacccggtcgagtatattcagtgcgatattagcaacccggaagaaacacagtcgagtctatcacgccttaatgatgtgacacacttgttctacgttacctgggcgagccgttcaaccgaagcggaaaactgcgaaatcaattctaaaatgttccgcaatgtgctgaactgcattattccgaatgccccgaaactgcagcatatctgcctgcagacagggaaaaaacattattttggctcatttgaggcgagcggaattgcggcccacgatcctccctacagcgaggatctgccccgtctggagagtcccaacttctactataacttagaagatattctcttcgaagaagtaaaaaaaaaagatggactgacgtggtcggttcatcgccctgggaccatctttggctttagcccgcatagcatgatgaatatgatttgcacactctctgtctacgccgccatttgtaagcatgaaggtacagtcttacgttttcccggcaccaaggaagcgtggtcactgtatagcgaggcttcggatgccgacttgattgctgagcaggagatctgggctgcagtagatccgtacgccaaaaatgaagcattcaattgcagtaatggcgatgtctttaagtggaaacatttttggaaggtgctggcagaacagttcgaagttgaatgtggcgaatttgagggcgatgagcgcttaaccttagtagaattgatgaaagataaagaatcagtttgggatgaaattgttaaagaatataatctcgtgcccacgaaactggaagatattggcgtgtggtggtttgtggattatatactgggaattgagtatccgctagatacaatgaacaaatcgaaagagcacggttttctgggcttccgtaacagtaaaagcagctttattcattggatagataaactgaaagactcaaagattgtaccg

SEQ ID NO: 1298 - DNA, 1164 bp, Solanum tuberosum
atgagctggtggtggtcacgtgccattggtgcaaccaaagaaaaagtggaagaagatgacgtcccgaaaaaatgtcagagcgtgggtttaattattggggttactggtattgtcggcaatagtctggcggagatattgccgggcacagatacccctggtggtccctggaaagtgtatggtgttgcgcgtagaccgcgcccttcttggaacgtaaattatcccattgaatatattcagtgtgatatatcatcacccgaagaaacccagagtaaactgaccctgctgacggatgtgactcatgttttctatgtgacgtgggcgattcggccgaccgaactggagaattgtgaaatcaacggtaaaatgttccagaatgttctggatgcgatcattcctaattgcccgaatctgagccacatctgcttgcagaccggtttaaaacactaccacggctcattcgaattattcgaaaaaattgcccatgataccccgtatcatgaaggtctgccgcggcttccggcgccgaacttctactataccctggaagacattctcttcgaagaggtgaaaaaaaaagaaggactgacatggagcatacaccgcccgggcttgattttcggttttagcccgtactcgatgatgaatattatcggcactctctgtgtatatgccaccatttgcaaacatgagggcctgccgctgcgttttccgggttcgaaaagcgcctgggatggttatagttactgcagcgatgcagatctgatcgcagaacaccagatctgggcctcaatggatccaaacgcgaaaaatgaagcctttaatatcagtaatggcgatgtgtttaagtggaaacacctttggaaagttctggcggaagagtttcaggttgaagcagaggaattcgatgaatctaaacgttggacgctggttgagatgatgaaagataaaggccagatttgggacgaaattgtgaaagaaaacggtctggtcgaatcgaaactggaagagatcggtcgatggtggttcgttgatttggttctgaagaaagaatgcccgctcgacaccatgaataaaagcaaggaacatggttttctgggattccgcaacagcaagaatgcattcataagctggatctacaaaataaaagcgtgtaagtttgtcccg

SEQ ID NO: 1299 - DNA, 1188 bp, Setaria italica
atgtcgtggtggtggaccggtgccattggagcggtgaaaaaacgccaagatgaacaagccgccgcggcagagccgacgtatcaaagcgtggccctggtcgttgggtcgaccggtatcgtgggtaccagtctgctggacatcctgcccctggctgatacaccgggcggcccatggaaagtttacgcgctgtctcgtcgcccgctgccgccctggtctccgccgccgtcaccggccgttactcatttgcacctggacttagccgatgcggcggccgtagcggatgcgctgaagccccttacagatattacacatgtattttatgtcgcatggaccgcgcgccctaccgaagctgaaaaccgagaagcgaatgcggcgatgctgcgcaatgtgcttagcgtagtggtgccgaattgtcccgcgctggtgcatgtctgcctgcagacgggccgtaaacactatgttggcccgtttgaagcactcggcggagttagcttccctgacccgccatttacagaggacatgccccgcttagactgtccaaatttctattatgatatggaagatattctattcgatgaagtgaatcgtcgtgaaggtgccgtcagctggtccgttcaccgccctaccactgtatttggttacagtcctcgcagtgccatgaatgtggttggcagcctatgcgtgtacgcagccatttgtcgcaaagaaggtgcgaccttccgttggcctggttcgcgcattgcgtgggaaggcttttcagatgcgtccgatgccgatctgatagccgagcatgagatttgggctgctgttgacccttttgcgaaaaatgaagcctttaactgcagcaatggggatctgtataaatggaaatatctttggcctatcctagccgatcactttggcgtcgaatgggctggctatgaaggagaagaaaatcgttttaaactcgaagaagcgatggcaggtaaggaagccctatgggcagagattgtgcgcgaaaatgagctgatctctactgaacttgatgagattaccaattggtggtttgtggatgcggtgtttggtgtggagttcgaacacctggattcaatgaataaatccaaggaacatggcttcctgggttttcgtaatacggttaacagttttaacacctggatcgaaaagctaaaagtgtttaaaattgttccg

SEQ ID NO: 1300 - DNA, 1161 bp, Antirrhinum majus
atgtcgtggtggtatcgccgctcgattggcgaaacggaacagaaacgtatagaaattaacggcgtgagtccgacgtaccaaagcgtagctctgattgtaggcgtgacaggtattgccggcagcggcttggcggaaaccctgtcgttctcagatacccctgggggcccttggaaagtgtacggcgtggcgcgtcgtccgtgccccaaatggctggccaaactgaacgtgaattacgtacaatgcgacattgcgaacacggatgaaacctactctaaggtagctccgctgacagatatcacgcatattttttacgtcagctggaccggctcagaagatgtggctttgaacacgttgatgtttaaaaacattctggacagcgtcatcccgaatgcaccgaacctaaaacacgtcagtctccagacgggtatcaagtattattggggtaatatggccgaaatggatagcacgaatcaaccgcacgaatgcccgttttatgaaaacatgccgcgcctcaagcaggataacttctattacaacctggaagatttagtttatgacagcgcggttcgtaaaaacggcttgagttggagtattcatcgccctgcgctcatttttgggtttagcccgtgttcgatgatgaacactgtctcgactctgtgcgtctatgccgcgatctgcaaacatgaaaataagccactggtttacaccggtaccgaaacttcctggacctgtttatgggatgcagtagattcagacctgctcgcagaacatttcctgtgggcggcaacggtgccgaacgccaagaatcaggcctttaatattaacaatggagatgtgtttaaatggaaacacatgtggaaagtgctggcgaaagaatttgatatcgaagctataggctatgaaggcaaagaaccggtgctgctggaggatctgatgaaagataaagacagtgtttgggatgaaatcgtgaaaaaacatgacttagtaccaaccaagctgcgcgatatcgcagcgttttggttagccgacgtagtttttcgtaacaaagagaccctttgctctatgaacaaaaacaaggaatttggtttcatgggctttcgcgatacgactaagtcttttgtgtcgtcgatcaacaaaatgcgcgattttaaattcattcct

SEQ ID NO: 1301 - DNA, 1158 bp, Coffea canephora
atgactgcgaactggtggtggaaccgctctatttcacctcgcaaatgcgtagaaaacggtggacaaaaagaacacaacagcgcagcgctgattattgggattacgggtattgtgggaagcagcctggccgagatgctgctgctgcatgatactccgggaaacccttggaaagtgtatggtgtggcacgtcgcccgcgtccgacatggctgagtgacaaacgactgaattacatccagtgcgatattagtaacagccgcgaaacgattagtaaactttctcccttaattgatattacccatatcttctatgtctgctgggtaggtagcgaagattgcgatctgaacggttcaatgtttcgaaacgttttgcgtgtagtcattccgaatgcgcctaatctacagcacgtttgcttacagacaggcattaaatactacctaggtgtcttcgatgaacgatataaacaggagccgcatgaatcccccttcaccgaggatctgccgaggctgcctatcccaaatttttattatgaccttgaggatattctggaagaggaaaccaaggccaagctcggcttaacctggagcgcacaccgcccggcactggtttttggtttttcaccgtgtagtatgatgaatatggtttccacaatcagcgtgtatgcaactatctgcaagcatgaaaataaaccgttagtgtaccctggttccgatttctcatgggattgttattatgatgtagttgacgcagacctcctggcggaacagcagatttgggccagtatggaaccgaaagccaaaaatcaggcctttaactgtagtaatggcgacgtgttcaaatggaaacatatatggaaaattttagcggaacagtttggcctggagatggttgaatatcgaaaaggccagaaagaaacgagcatggcggaactgatgaagggaaaggaacctgtctgggacgaaatcgttaaaaaacacaaacttgtcccaaccaagttaaacgatattgcggcgttttggttagcggatgtggtgttttatagcgataaccgcgtttcgtgcatgaacaaaagcaaagaattgggcttcttgcgtttcaaagattcgacaaagagtttcctcgattcgatcgagaaaatgcgcgcgtacgggtttattccg

SEQ ID NO: 1302 - DNA, 1203 bp, Panicum hallii
atgacctcaagtatgagttggtggtggcgtggtgccccgttaaaacgtgaagatgaacaggttgccgcggcagcagagccaagccctttccagtcagttgcgctggtcgttggtagcaccggtattgtgggtactagcttggttgatattttacctctgccggacaccccgggtggtccgtggaaagtgtacgccctgtctcgcaggccgctgcctccttggtcacccccgccgccatcgagcgtaacacacttgcatttagacctagccgatcccgtggccgttgccgaagccctgacccctctgaatgatgtcacacatgtgttttacgccgcttggtctccgcgcgcaacggaagctcaaaaccgtgaagttaattcggccatgttgcgcaacgttctgagcgcagtagttccaagctgcccggcgattgtgcatatatcacttcagaccggcaccaaacattatatgggaccgccagaagccttcggtaggacagcggcactggatcccccgtacagcgaagatatgcctcgactggattggcccaacttctactacgaccaggaagatctgctgtttgacgcggttgcgcaatgcggcgatggcgccgccgtgagctggtccgtgcaccgccctaaccttatattcggtttctcaccgcgttctgcgatgaacattgtctgcagcatttgtgtttatgcggcaatatgccgcaaagaaggtgtgccgttacgttggccgggctcattaggtacctgggagggattttcatccgcgtctgatgcggatctcatcgcggaacaacaaatttgggccgccgtcgatcccacggccaaaaatgaagcgtttaattgctcaaatggtgatatttataagtggcgtcagctgtggccgatcctggccgaacgtttcggtctggagtgggtgggctacgaaggtgaagaaaatcgggtgaaagtcagcgaagccatggcaggcaaagaaccgttgtgggcggagattgtcaaggaaaatcagctggtgccgacgcagttgcatgaggttgcgaattggtggtttgtggatgcgctgttttctgttgagctcgagttcctggattcgatgaacaaatctaaagagcacggttttttaggttttcgtaatacgatcaaaagcttcaaatcatggattgatcgtatgaaagcgtacaacattgtgcca

SEQ ID NO: 1303 - DNA, 963 bp, Oryza sativa
atggtatccagcgcactgccgcgcggagagccggtcactcacatctgcgtggatctggcggatcccgcggcggtcagcgcggcgctggcacctcttacggatattacccacgtgttttacgtggcgtgggcgccgcatttttttgaagaagaccagaaccgcgaagcgaactcacgcatgctgcgcaacgtgctgagtgctgtggtgcctaactgtccggcgttggtacacgtgagtttgcaaaccggaagtaaacattacatcggcccaccggaatctattgggaaatttactatagaaactccgttttctgaagatatgccacggttggataactgcccaaacctgtactatgatcaagaagatgcactgttcgatgcggtgtcgcgctcgcgccgtcgcggcgcggcggtcattagttggagcgtacatcgtccttctctggtctttggtttcagcccgcagagtgctatgaatgtagtgtgcactttgtgtgtgtatgctgctatttgccgcaaagaaggcggtcgtaaactgcgctggccgggctctctaggtgcgtgggaaggtttttcaaatgcttcggatgcggatctagtggcggaacagcacatttgggcggcagtggaccccgcggcgcggaacgaagcttacaactgtagcaacggcgacgtgcgtgatggagtggtgggcgtccggggtggtggtgaacagggagagccggatgggggcggtatcgtgcgtgaagaaggcctcgtagccgccgcagaactggatcaggtagctaattggtggtttgtagatgcactctttatggataaatgggaatttctggacacgatgaataaaagcaaagaacatgggtttctggggttccgaaatactgttaagagctttggtacctggattgacaaactccgcctgtataaaattgtaccgagctgccgtatcgtgtccagcctg

SEQ ID NO: 1304 - DNA, 1191 bp, Setaria italica
atgtgggccggcgcaattggcgctgcgtggaaacgccaggacgaccgtgctgcggttagctcacagagtcagcaggcctttcaaagcgtggcgctggtcgtgggcagcaccggtatcgttggtgcgagcctggtggatatactgccattgccggacactccaggcggcagttggaaagtctatgcattgagccgccgctcgctgcctccctggtcacccccgtccagctcatctgtgacacatattaaagtcgacttgacggatagcgcagcggtcgctgaggctctaaccccgcttaccgacgtcacgcacgtgcatgtgttttatgtggcgctctccccgcgaccgacagaagcccagtcccgtgagaccaactctgcgatgctccgtaatgttcttagcgttgttgttccgaccgcccgccgcagcagcacggatcaggcgttgttacgtccacctcgtctgcaggatccccgtccgcgtgccgcggtgcataggggaggtgaggatatgccacgattggatatcccggtgttttactacgaccaggaggatgtgctgctcgatgcggttgcacgtggtgccgcctccgctgtatcttggagcgtacatcgtccgaatctgattttcgggttttttccacgtagtgccacaaatattatttgttctctgtgtgtttacgcagccatttgcctgaaagaggacatcaaactgcgctggccgggcactcgtagcgcctgggaaggattcaacacctgcagcgatgccgatttaatcgccgaacaacacatatgggcggcggtggaccccatggcacggaacgaagcgttcaattgtagtaacggggatatctacaaatggaagaaactgtggccggtgttagcgggacgatttggcctggaatgggctggctacgaaggcgaagagaaccgtttcaaagttgcagaagccatgactggcaaagaagccgtttgggcggcgattgttgccgagaacgatctggccgaaaccaaactggatgaagtggcgagttggtggctgattgatgcggtggccgaccagtatggtctggatcgtgagattctggactctatgaacaaatccaaagaacatggatttcttggctttcgaaataccgtgaagtcgtttaacacctggatagataaattaaaagcccataagattgtgccg

SEQ ID NO: 1305 - DNA, 1101 bp, Sesamum indicum
atgtatctggacaccacgagttggtggttcaaacgttcaatcggcgaagtcgataagaaaaaagtggaacctaacggagtggcgccgagctatcagagcgttgcgttgattgtaggcgtgaccggcattgcaggctcgggcagcgcgggcctggctaatctgcatgtcgaatacgtccaatgcgacattgcgaagacggaggaaacctatagcaaactgagccctcttaccgacattacgcatatcttttacgtctcctggacagggtcggaggactgtgagcttaatacattgatgtttcgcaacatccttgacgcggtgattccgaacgccccgaacttaaaacatcttagcctgcaaaccggcatcaaatattattggggtaatatggccgagatggactccagcaaccagccgcatgactgcccgttttatgaaaatatgccccgtctaaaacaggaaaatttttactacaacttagaagacctggtatacgaatcagccctgcgtaaaaactctttgacttggagcattcatcgtccggcgctgatttttggcttcagcccgtgttctatgatgaacacggtatctactctgagcgtttacgcggccatttgcaaacacgaaaacaagccgctggtatatactggtacggaagtgagctggacttgcttatgggatgctgtggacgctgatctgctggccgaacatttcttatggaccgcgacagatccaaaggccaaaaaccaagccttcaatattaacaatggtgacgtctttaagtggaaacacatgtgggacgtgttggcgcagcagttcggtctggaagccgttggatatgaaggtaaggagccggtcttgctggaagatttaatgaaagataaagaaggagtctgggatgaaattgtgaagaaacacgatctggtgccgacgaaattgcgcgatatcgcggccttctggctggcggacgtggtttttcgtaacaaagaaacgctgtgcagcatgaataaaaaccgtgaattcgggtttatgggctttcgcgatacgaccaaaagttttgtcaacaccatcaacaaaatgcgagcctatcgcttcatcccg

SEQ ID NO: 1306 - DNA, 1182 bp, Digitalis purpurea
atgtatactgatacgaccacctggtggtacaaaagatctataggtgacattgaacagaagaacgttgagaccaacggagtggccctgaactataagtctgttgccctgattgtgggtgttaccggcattgcaggctccggcttggccgaaactctttccaaaagcgacacgccggggggcccgtggaaagtgtatggcgtggcgcgtcgaccgtgcccggaatggttggccaaacttcacgtatcgtatatccagtgcgatattggcagtacagatgacacgtccgctaaactgagccccctgagcgacattacgcatattttttacgtgagctggaccggatctgaggactgcgataaaaatgcgatcatgttcaagaatatcctggactcagtcattcccaacgcaccaaatctgaaacacatttcgttgcaaaccggtatcaaacattattggggtaacatggtggatgaaatggataccacgaatgtgtctcacgattgccctttctacgagaatatgccccgcctgcgtcagcctaatttttactataatttggaagatctgctgtacgaagcgtgcggtacacagaacggtgcgctgacgtggacggtgcatcgcccggccctgattttcggtttttcaccctgtagtctgatgaatattgtagctaccctgagcgtttatgctgctatttgcaaatacgaaaataaacctctagtttacaccggtacggagacctcatggaattgtctggtagacgcggtggatagtgacctgctggcggaccatctggtgtggggtgccattagtccaaacgctaaaaaccaggcttttaatattaataacggagatgtatttaagtggaaacacatctggaaggtccttgcggatcagtttgaaattgaatttgttggttatgagggtaaagagccagtgagcttagaaggcctgatgaaagataaggattcggtatgggacgaaatcgttgaacgctatgacctggttccgaccaaactgaaagatattgccgcgttttggtttgcggatgtagcgttcagcattgaaggcgcggtgtcgtctatgaacaaaaacaaggaatttgggtttatgggctttcgtgattcaaccaagtcatttatcagcagcgtgaacaaagttcgtacctaccgctttgtgccg

SEQ ID NO: 1307 - DNA, 1188 bp, Digitalis lanata
atgtacaccgatacgaccacttggtggtataaacgctcaattggtgatattaaacagaagaacgtcgaaacaaacggagttgcccttaattacaaaagcgtggccctgattgtcggtgttaccggcattgcgggctcggggctagcggaaaccctcagtatgtctgatacccctggcggcccatggaaagtctatggcgttgcccgtcgtccatgtccggagtggttggccaaactgcatgtctcctacattcagtgcgatatagggagcacagatgatactagtgccaagctgtcgccgctgagcgatattacacatatcttctatgtatcctggaccggcagcgaagattgtgataaaaacgcgatcatgttcaaaaatatcctggactcggtaattccgaatgccccgaacttaaaacatattagtctgcagaccggtattaaacattactggggtaatatggttgatgaaatggatattaccaacgtgagccacgactgcccgttcaacgagtatatgccgcgtctgcgccagcctaacttttattccaacctggaagatcttttgtatgaagcatgtcgtacccagaacggtgccctgacgtggactgtccatcgtcctgctctgatttttggtttctccccgtgctcgctgatgaacatagttgccacgcttagtgtgtatgcggcgatttgcaagtatgaaaataaacctcttgtctataccggcacgcagacgtcgtggaactgtctggtggatgcggtagattcagatctgttgtccgagcacctggtctggggtgcgattagtcccaatgctaaaaatcaggcattcaacattaacaatggagatgtgtttaaatggaagcatatttggaaagtcctggcagaacaactccagctggaaatcgagtttgtcggctacgaaggtaaggagcccgtgagcttagaaggccttatgaaggacaaggattccgtgtgggatgagatggtggagaaatacgacctggttccaaccaaactccgcgacatcgccgcgttctggtttgctgatgttgcgttttcaatcgaaggtgccgtttcctcaatgaacaaaaacaaggaattcggctttatggggtttagggattcgacaaaaagcttcattagctcggtcaataaagtacgtagctatcgctttgtcccg

SEQ ID NO: 1308 - DNA, 813 bp, Nepeta mussinii
atggcctctacagcaaatccaatgcaagtaatgaaaaagaaattagagggaaaagtagtgatcgtcactggaggcgcttctggtatcggccaaacagcggccagagtcttcgcacagcatggcgcaagagctgtggttattgccgacatacaatccgaagtaggtaaatctgttgctaagtcgatcggtgatccttgctgttacgtacagtgtgatgtatcagatgaagaggaagttaagtcaatgattgaatggactgcttcagcttatggtggtttagatatgatgttttcgaatgttggcatcatgtccaaatcggcgcaaactgttatggacctagacctgttggagtttgacaaagtcatgagagtaaatgcgcgagggatggccgcgtgtttaaaacatgctgcaagaaaaatggtagaattaggcactcgtggaactattatctgtacaaccacaccattatcatcgaggggtggtcagtcaatgactgattacgcgatgtctaaacatgctgttatgggtttagtacgatccgcttcaattcagttaggcgcacacggtatacgtgtcaactgtgtgacaccatcagtagttcttacgcccctagctcaacgtatggggttagcaactccagacgattttcatacgcacttcggaaattttacctcgttgaaaggtgtgtatttgacaccggagcaagttgctgaagccgtggtatatttagcctctgatgacgcagctttcatcacaggacacgatttggttttggacggtggcttactgtgtctgcccttctttgcaccttct

SEQ ID NO: 1309 - DNA, 813 bp, Nepeta mussinii
atggcaagcactgccaatcccatgcaggttatgaagaagaagctagaaggtaaggttgttattgtaacagggggcgcttcaggaataggtcaaactgctgctagagtctttgcgcaacatggtgccagggcggttgtcattgcagatattcagtcggaagtcggcaaatcagttgctaaatccatcggcgatccatgttgttatgtgcaatgtgatgtgtccgatgaagaggaagtaaaatcgatgatagagtggaccgcttcagcatacggaggtttagatatgatgttttcaaatgtcgggataatgagtaaatcagctcagacggtgatggatttggatttgttggaattcgacaaagttatgagagtaaatgcgagaggcatggctgcgtgtctaaaacatgcagctagaaagatggttgagttgggcactaggggtacaatcatatgtactacaacaccactttcgtcacgcggtggccaatcgatgaccgactatgccatgtctaaacatgcggttatgggtctggttaggtcggcttctatccaactcggtgctcatgggatcagagtcaattgtgtaactcctagcgtcgtcctgacgcctctggcgcaacgtatgggcctagccacaccggatgatttccacacacatttcggtaactttacaagtctaaagggtgtatatcttacacctgagcaagttgctgaagctgtagtctacttggcctctgacgatgcagcctttattacaggacatgatctcgttttagacggtggtttgctctgcttacccttctttgcgcctagc

SEQ ID NO: 1310 - DNA, 963 bp, Nepeta cataria
atggctgataaagagggagaggtcgtatgtgtcaccgggggatcagggtttattggtagttggctagttagtctgttattaagaagaggttattcagtcagagcaaccgttaaaaacctaggggatgaaagggaaacgaagcatttagaagctattgaaggcgcagattcaaggctctctttattccaaatcgatttgttagattacgactcagtggctacagcggtcggagacgctgcgggtgtttttcatctagcgtctccctgcacgatcgaccaggttaatgatccacaaagggaattgttagatccggctattaaagggactcttaacgttctgaaggccgcaaagaacttaggcgtaagaagagtcgtggttacatcatcaatctctgctatgatcgctagttctaatagtttggctgaaacaggtgaagattgctggatagacgaggattactgtaggcaaaatggcttatggtatcctgttagtaaggctcttgctgaaaaagccgcatggaaactcgctgaagaaaatgggttggatattgtggtagttaatcctgggatggttgttgggcctatactacctcccgcgctcaactcatcaatgcaattaatgctacacgtcctacaaggtaaagatttctttgaagggttttttatgggcttagttcatgtgaaagacgtggctttggcccaaattttactctatgagaatacatcagccagtggaagacatttgtgtgtcgagtctctttcaagatacgacgattttgccaaacaaatggagaagttatacccagaatacaaactgcctagattctctaacaatgcccagcacggttctcttaagtcagatgccgcgctcaaaaaattacgtgatttaggtatagaatttgccccattggagcaaattgtaaaagattctatagaatcattaaggtccaagggttacatctct

SEQ ID NO: 1311 - DNA, 963 bp, Nepeta cataria
atggcagataaagaaggtgaagtcgtgtgtgttactggtggttctgggttcattggtagctggctggttagtctcctattgaggagaggttattctgttagagctactgtaaaaaaccttggcgatgagagagaaacgaagcatctggaggctattgagggtgcagatagccggttgtcactattccaaatagaccttttagattatgactctgtcgcaacggctgttggagacgctgcaggagtcttccatcttgcatctccatgcacaattgaccaagtcaatgatcctcagagagaattgctagaccccgcaataaaaggtacactaaatgtcttgaaggctgcgaagaatttgggcgtgagacgcgtagttgtaacgtcctcaatctcagctatgattgcctcttccaattcattagcagaaaccggtgaagattgttggatagatgaggactattgcagacaaaacggtctttggtatcctgtttcaaaggcattggcggagaaagcggcatggaaactagccgaagagaacgggttggatatagtagtcgttaaccctggcatggtcgtagggccaattttgccaccagccttaaactccagtatgcagcttatgctccatgtacttcaaggtaaagacttcttcgaaggattttttatggggttagttcatgtaaaggacgttgcattggctcagattttattgtacgagaacacatcagctagtggaagacatttgtgtgttgagagtttgagtaggtacgacgattttgcaaagcaaatggaaaagttgtatcctgaatacaaactaccccgcttctctaacaacgcacaacatggctctctcaaatctgatgctgcacttaagaaacttcgggatttgggcatcgaattcgccccactcgagcagattgttaaggatagcattgaatcattgcgcagtaaaggctacatttct

SEQ ID NO: 1312 - DNA, 963 bp, Nepeta cataria
atggctgacaaagaaggcgaagtggtttgcgtgacaggcggaagtggcttcatcggaagttggctggtttcactgttacttagacgtggctattccgtgcgtgcgactgtcaaaaacctaggtgacgaaagggaaaccaaacatttagaagctattgaaggtgcagattcacgactatcactgttccagatagacctactggattatgactccgtcgcaacggctgttggtgatgccgccggagtattccacctggctagcccctgtacaatagatcaggtgaatgatccacaacgtgagttattggatccagctatcaaaggaactcttaatgttttaaaggcggctaaaaaccttggagtaagacgtgtcgtcgtcacttcttcgattggtgcaatgattgcaagcagcaactcgttagctgagactggcgaggattgctggattgatgaagactattgcagacaaaatggcctttggtacccagtatcaaaggctttggcggagaaagctgcttggaaactcgcagaagaaaacggcctagatatcgtggtggttaatcctggcatggtggtcggcccaatattgccgcccgccctaaattcatctatgcagctcatgttacatgttctacagggtaaagacttttttgaaggtttttttatgggcttggttcatgttaaggacgtcgcattagcgcagatactactttatgaaaacactagcgcatcgggtagacatctgtgcgtcgaaagtctatcacggtacgatgatttcgcaaagcaaatggagaaactgtaccctgaatacaagttgccaagatttagcaataatgcacagcatgggtcattgaaaagtgatgcagctttaaaaaagctaagagacttgggtattgaatttgcgcctctggaacaaattgtcaaggattccattgagtccctacggagtaagggatatatcagt

SEQ ID NO: 1313 - DNA, 963 bp, Nepeta cataria
atggctgataaagaaggtgaggtcgtgtgtgtcactggtggttctgggtttataggatcgtggctggtttcgctgctcttacgtagaggatactcagtgcgtgcaaccgttaagaacttaggagatgaaagggaaactaagcacttagaggctatcgaaggtgctgattctagacttagtttatttcaaattgatttacttgattacgacagtgtagctactgcagtgggtgatgccgctggtgtgttccacttagcatcaccctgtactattgatcaagtcaatgatccacaacgtgaactgctggatcctgcgataaagggtaccttgaatgtattgaaagccgcaaaaaatttaggtgttcgcagagttgtagttacatcctcgataggtgccatgattgcaagttccaacagcctagctgaaaccggcgaagattgttggattgatgaagattattgcagacaaaatggtctttggtatccagtctctaaggctctagctgagaaggctgcttggaaactagcagaagaaaatggattggacatagtggtcgttaacccaggcatggtagtgggtcctatattacccccagctttaaattcctccatgcagttaatgcttcatgttttgcaaggaaaagattttttcgaagggtttttcatgggtttagtacatgttaaagacgtcgctttagcacaaatcctactatatgaaaatactagtgcaagcggtcgtcatctatgtgttgaatcactatccagatatgatgactttgctaaacagatggaaaaactgtatcccgaatataaattgcctcgtttttccaataatgctcagcacggctccttgaagagcgacgctgcattgaaaaaattaagagatctcggcattgaattcgcaccattagagcaaattgttaaggactcaatcgaatctttacgttctaagggttatatatca

SEQ ID NO: 1314 - DNA, 963 bp, Nepeta cataria
atggcagataaggagggtgaggttgtatgtgtcacaggaggtagtggtttcatcggcagttggttagttagtcttctattgaggagaggctactccgtcagagctactgtgaaaaatttgggtgacgaacgcgaaacaaaacatttggaggcaattgagggtgctgattctagattatcgttatttcaaatcgacttactagattatgattctgtagctactgcagttggggatgctgctggagtttttcacttggcctctccatgtaccattgatcaagttaacgatccacagagagagttactagatcccgcgattaaggggaccttaaatgttttaaaggctgcaaaaaatttaggcgtcagaagggttgtagtaacttcctcaatttccgccatgatagcaagttccaatagtctagccgaaactggagaggattgttggattgacgaagactattgtaggcagaatggtttgtggtatccagtttctaaagcgttagcagaaaaggcagcgtggaagcttgcagaagaaaacggtctagacattgtggttgttaaccccggtatggttgtaggccctatattacctcctgcgcttaactcatcaatgcaattaatgttgcatgtactacaaggtaaagacttttttgaggggtttttcatgggtttggttcacgtaaaagacgtcgcgctagctcaaatattgctttatgagaacactagtgcatcaggaagacacctgtgtgtggaatccctatccagatatgatgattttgctaagcaaatggagaagctgtatcccgaatataaacttcctcgttttagcaacaatgcacaacatggttcactaaagtctgacgctgcattgaaaaaactcagagatcttggcatagagtttgcccctcttgaacaaatagtcaaggactccattgagtcgcttaggtccggaggatatatctct

SEQ ID NO: 1315 - DNA, 963 bp, Nepeta cataria
atggcagataaagagggcgaagtcgtttgcgttaccggtggctcgggttttatcggttcttggttggttagtttactattaagaagaggctactcagttagggcaactgtcaaaaacctaggtgacgaaagagaaacgaaacatcttgaagcaatcgagggtgctgatagcagattgtccttatttcagattgaccttttggattacgattccgttgctacagcagtcggcgacgctgctggtgtgttccacctagcaagcccatgtaccattgatcaagttaacgatccacaacgtgaattgttggatccagctattaagggcactctgaacgtcctaaaagccgcaaaaaatttgggcgtgagaagggtcgtcgtaacgtcttctatttcagcaatgattgcttcatcaaattctctagctgaaactggggaggactgttggattgacgaagattattgtagacagaatggcctgtggtatccagtgtctaaggctcttgctgaaaaggctgcttggaaattagctgaggagaatggtcttgacattgtggttgtaaaccccggtatggtcgtaggtccaatactaccacccgctcttaattctagcatgcaattaatgttgcacgttttgcaaggaaaggatttctttgaaggtttctttatgggtttagttcatgttaaggatgttgcccttgctcaaattcttctttacgagaatacgtcagcttcaggtagacatttgtgtgtagaatctttgtcaagatacgatgattttgctaagcaaatggagaaactgtatcctgagtataagcttccgagattttctaataacgcccaacatggatcactgaaaagtgacgcagctttgaagaagttgagggacctaggaattgagtttgcgccattagagcaaattgtgaaggattcaatagaatctttgagatccggtggttatatctcg

SEQ ID NO: 1316 - DNA, 963 bp, Nepeta cataria
atggccgataaagaaggtgaggttgtgtgcgttaccggagggtctggttttattgggtcttggttggtatcattgttattgagaagagggtacagtgttcgtgcgaccgttaagaacttaggagacgaaagagagacaaaacatttagaagctatagagggggctgattctagacttagcctctttcagattgatcttttggattatgatagtgttgctaccgcagtgggtgatgctgctggagtctttcatttggcaagtccatgtaccatcgatcaagttaatgacccgcaaagagaactgttagaccctgccattaagggaacattaaatgtccttaaagcggctaaaaaccttggcgttcgaagagtagtcgtgacatcatcaattggggccatgatcgccagttctaattcactagccgagactggtgaagattgttggatagacgaggactattgtagacaaaatggtctgtggtatccagtttcaaaagcattagccgaaaaggctgcatggaaacttgcagaggagaatggcttggacatcgtcgtcgttaatccaggtatggtcgtcgggccaattttgccacctgcgcttaattcctccatgcagctgatgttgcacgtattacaaggcaaggactttttcgagggatttttcatgggactcgttcacgttaaggatgttgccttagctcagatattactttatgaaaatactagtgccagtggtcggcacttatgtgtagaaagcttaagcagatatgacgactttgcaaagcaaatggaaaaactatatcctgaatacaaacttccacgtttttctaataatgctcaacatggctccttgaaatctgacgctgcactgaagaaacttagagacctgggcatagaatttgcaccacttgaacaaattgtaaaggattctattgagtcactccgctctggagggtatatcagt

SEQ ID NO: 1317 - DNA, 963 bp, Nepeta cataria
atggcagataaagaaggagaagttgtatgcgtgactggtggttcagggtttattggttcatggttggttagtctattgttgaggagaggctattccgttagggccaccgtcaagaacttaggagatgaaagggaaactaagcacttagaggccatagaaggagcagattcccgcctgtcgctatttcagatagatttgttggattatgatagtgttgccactgctgttggtgacgctgctggagtctttcatttagcttctccatgtacgattgatcaagttaatgatccacaaagagaattgttggatcctgcaatcaaagggaccttgaatgttctcaaggctgcgaagaatttgggtgttagaagagtcgtggtcacatcaagcattggagccatgattgcctcatcaaactcattagctgagactggggaagattgctggatcgatgaagactattgcagacagaatggtttgtggtatcctgtgtctaaagcccttgcagaaaaagcagcctggaaattggccgaagaaaacggtctcgatattgtagttgtcaacccaggcatggtggtgggtccaatattgcctccagctttgaactctagcatgcaattgatgcttcatgttctacaaggtaaagatttcttcgagggttttttcatgggtttagttcatgtcaaagacgtggcattggcgcaaattttactatatgagaataccagtgcaagtggaaggcatttgtgcgtggaatcattatcaagatatgacgattttgctaaacaaatggaaaagctgtatccagaatataagctaccgaggttctcgaacaatgctcaacatggctctttgaaaagcgacgcggctttaaaaaaattacgtgatctgggtatcgaatttgcacccttggagcaaattgtcaaagattcaatcgaatctctaaggtcaggaggctatataagt

SEQ ID NO: 1318 - DNA, 963 bp, Nepeta cataria
atggctgataaagaaggtgaagttgtttgtgttactggtggttcaggttttattggttcatggttggtttctttgttattgagaagaggttactctgttagagctactgttaaaaatttgggtgacgaaagagaaacaaaacatttggaagctattgaaggtgcagattctagattatcattgttccaaattgatttgttggattacgattcagttgctactgcagttggtgacgctgcaggtgtttttcatttggcttctccatgtacaattgatcaagttaacgatccacaaagagaattgttggatccagcaattaaaggtacattgaacgttttgaaggctgctaaaaatttgggtgttagaagagttgttgttacttcttcaatctcagctatgattgcatcttcaaattctttagctgaaacaggtgaagattgttggatcgatgaagattactgtagacaaaacggtttgtggtacccagtttctaaagcattggcagaaaaagctgcatggaaattggctgaagaaaacggtttggatatcgttgttgttaaccctggtatggttgttggtccaattttgccaccagcattgaactcttcaatgcaattgatgttgcatgttttgcagggtaaagatttctttgaaggtttctttatgggtttggttcatgttaaagatgttgctttggcacaaattttattgtacgaaaacacttctgcttcaggtagacatttgtgtgttgaatctttatcaagatacgatgatttcgcaaagcaaatggaaaaattgtacccagaatacaaattgccaagattttcaaacaacgctcaacatggttctttaaagtcagatgctgcattgaagaaattgagagatttgggtatcgaattcgcaccattggaacaaattgttaaagattctattgaatcattaagatcaaaaggttatatttct

SEQ ID NO: 1319 - DNA, 963 bp, Nepeta cataria
atggctgataaagaaggtgaagttgtttgtgttactggtggttcaggttttattggttcatggttggtttctttgttattgagaagaggttactctgttagagctactgttaaaaatttgggtgacgaaagagaaacaaaacatttggaagctattgaaggtgcagattctagattatcattgttccaaattgatttgttggattacgattcagttgctactgcagttggtgacgctgcaggtgtttttcatttggcttctccatgtacaattgatcaagttaacgatccacaaagagaattgttggatccagcaattaaaggtacattgaacgttttgaaggctgctaaaaatttgggtgttagaagagttgttgttacttcttcaattggtgctatgattgcatcttcaaattcattagctgaaacaggtgaagattgttggatcgatgaagattactgtagacaaaacggtttgtggtacccagtttctaaagcattggcagaaaaagctgcatggaaattggctgaagaaaacggtttggatatcgttgttgttaaccctggtatggttgttggtccaattttgccaccagcattgaactcttcaatgcaattgatgttgcatgttttgcagggtaaagatttctttgaaggtttctttatgggtttggttcatgttaaagatgttgctttggcacaaattttattgtacgaaaacacttctgcttcaggtagacatttgtgtgttgaatctttatcaagatacgatgatttcgcaaagcaaatggaaaaattgtacccagaatacaaattgccaagattttctaacaacgctcaacatggttctttaaagtcagatgctgcattgaagaaattgagagatttgggtatcgaattcgcaccattggaacaaattgttaaagattctattgaatcattaagatcaaaaggttatatttct

SEQ ID NO: 1320 - DNA, 963 bp, Nepeta cataria
atggctgataaagaaggtgaagttgtttgtgttactggtggttcaggttttattggttcatggttggtttctttgttattgagaagaggttactctgttagagctactgttaaaaatttgggtgacgaaagagaaacaaaacatttggaagctattgaaggtgcagattctagattatcattgttccaaattgatttgttggattacgattcagttgctactgcagttggtgacgctgcaggtgtttttcatttggcttctccatgtacaattgatcaagttaacgatccacaaagagaattgttggatccagcaattaaaggtacattgaacgttttgaaggctgctaaaaatttgggtgttagaagagttgttgttacttcttcaatctcagctatgattgcatcttcaaattctttagctgaaacaggtgaagattgttggatcgatgaagattactgtagacaaaacggtttgtggtacccagtttctaaagcattggcagaaaaagctgcatggaaattggctgaagaaaacggtttggatatcgttgttgttaaccctggtatggttgttggtccaattttgccaccagcattgaactcttcaatgcaattgatgttgcatgttttgcagggtaaagatttctttgaaggtttctttatgggtttggttcatgttaaagatgttgctttggcacaaattttattgtacgaaaacacttctgcttcaggtagacatttgtgtgttgaatctttatcaagatacgatgatttcgcaaagcaaatggaaaaattgtacccagaatacaaattgccaagattttcaaacaacgctcaacatggttctttaaagtcagatgctgcattgaagaaattgagagatttgggtatcgaattcgcaccattggaacaaatcgttaaggattctatcgaatcattaagatcaggtggttacatttct

SEQ ID NO: 1321 - DNA, 963 bp, Nepeta cataria
atggctgataaagaaggtgaagttgtttgtgttactggtggttcaggttttattggttcatggttggtttctttgttattgagaagaggttactctgttagagctactgttaaaaatttgggtgacgaaagagaaacaaaacatttggaagctattgaaggtgcagattctagattatcattgttccaaattgatttgttggattacgattcagttgctactgcagttggtgacgctgcaggtgtttttcatttggcttctccatgtacaattgatcaagttaacgatccacaaagagaattgttggatccagcaattaaaggtacattgaacgttttgaaggctgctaaaaatttgggtgttagaagagttgttgttacttcttcaattggtgctatgattgcatcttcaaattcattagctgaaacaggtgaagattgttggatcgatgaagattactgtagacaaaacggtttgtggtacccagtttctaaagcattggcagaaaaagctgcatggaaattggctgaagaaaacggtttggatatcgttgttgttaaccctggtatggttgttggtccaattttgccaccagcattgaactcttcaatgcaattgatgttgcatgttttgcagggtaaagatttctttgaaggtttctttatgggtttggttcatgttaaagatgttgctttggcacaaattttattgtacgaaaacacttctgcttcaggtagacatttgtgtgttgaatctttatcaagatacgatgatttcgcaaagcaaatggaaaaattgtacccagaatacaaattgccaagattttctaacaacgctcaacatggttctttaaagtcagatgctgcattgaagaaattgagagatttgggtatcgaattcgcaccattggaacaaatcgttaaggattctatcgaatcattaagatcaggtggttacatttct

SEQ ID NO: 1322 - DNA, 1470 bp, Nepeta cataria
atgcagtataagttggcccttaatggtaagacattaaaaggtgaaactacaaccgaagccgtggatgctgctacagcagagaaggtattcaaacaatatgcaaatgataatggagttgacggcgaatggacctacgatgatgcgacgaagaccttcacagtcaccgaagcgttttgtaggtcctccctgctgttaagaaaagctctaggtggcagcaggagggctgcagcagctgctacctgttccagtgcttatgcttgtgggtggcaatctgagcgtgggcgttggtactctggtggagaaggaaccaccatctcagcgccaggttatcatgtgaacaccgcaccaagtcacatgactggcgcagtgttttgggacaaggacaagcctatcacatacgaggaattcgagatgcctaggccaaaagcgaatgaagtcctgattaagaccaaggcgtgtggtgcctgccattcagacttacatgtcattaagggagacctgaaatttccttgtccctgtattctgggacacgagattacgggcgaggttgttgagcacggtccgttgacagaaacaaaatatattgagagatatcccgtcggaagtaaggttataggtgccttcattatgccatgcggtagttgtttctattgtagccgtggcgaagatgacttgtgcgaaccttatttcgcatataatcgtgcaaaagggacgctgtatgatggacagaccagactttttcttaggggaagtgggaaaccggtacatatgtggtctatgagcggacttgctgagtactgcgtaacacctgtgaatggtctaggcgcactacctgacacactaccctacgccgaatcctctgttctgggatgtgcggtatttaccgcgtacggagcgatagctcacgcagctgaagtcaagccgggaaatagtgttgcagtgattggaataggtggggtaggctcctcctgtctgcaaatcgctaaggccttcggtgcctctgaaatcattgcagtcgatgtagaagacggcaagttagagacggctaaaacattcggcgctacgcacattattaattcaaggaaggaggacgcgatagccaaaataaaagaattgacggacgggagaggggttgatatcgccgttgaagccattggtggccctaaaaccttcgctcaatgcgtagggtcagtgcgtgctggcggaaaagccgttatgatcggcttaagtcccactgggggaaagggagaggtcgagataacgcaactggtgcgtagaaaggtgaaagtgatcggttcatatggtggtcgtgcaatgactgatttgccgaaactggtcgaacttgctgaacaagggacttttaatctagaagcagcggttactcgtagatataagttcgaggaagtcgcccaggcatatcaagatctgcaaaataaaacaatcgtcggcagaggcgtgatcgaaattatg

SEQ ID NO: 1323 - DNA, 957 bp, Unknown
  Nepeta cataria or Nepeta mussinii
atgtctcgggaaggggagggtaaggttgtctgcgtgaccggggcttccggctacgtggcttcgtggctggtgaagctcctgttgcagcgaggctacacagttcgagcaacggtgcgaaatctgtccgaccccctcaaaaccgagcatcttaaagcccttgacggagccgctgagcgactggaactgttcgaagcagatctggtgaaggaggggtcattcgacagcgttttccacggatgcgacggagtgtttcacaccgcctcgccggttatctttaggactactaaccctcaggccgacctcatcgagcctgccgtcaaaggcactgtgaacgttctgaggtcttgcaccaaggcttctagcgttcgaagagttgtactgacctcatccaccgcggctgttgttgtcaacggtagaccatttggtccggatgttgttgtcgacgagacatggttctcggatccacatttctgcgagaagaacaaagattggtattgtctctcgaagaccctcgccgaggaggccgcctggaagttcgccaaggagaacggcatcgatctcgtcgtgatgaaccccggtttagtgcttggtcctctgctacagcccactctgaacattacctctcaggtcttcttggatataatcaagggtaaacctatcgctccttactaccaatgtgtcgatgttcgagacctcggagacgctcacattctgggattcgaaaagagctctgcttcaggacgatacattttggtgggtaagaccattacccacctacagtttatgcaactgctccacaatctgtacccctcaattgttgacgcccctacttccgtcgcagacaaccccatcggtgaagtgtcgaagaagaaggcagaatcactcggcatgtcgtttatgcccctggaggtcaccgttaaggattccgttgaatcgctgaaggagaagaacttcctc

SEQ ID NO: 1324 - DNA, 972 bp, Unknown
  Nepeta cataria or Nepeta mussinii
atgaagcgagtttgtgtcaccggaggcaccgggttcatcgctagttggctcatcaagcgtttacttcataccggctactcagttaataccacagtaagaaagaacgctgacggcaaacgagacctgcgctaccttacgaacctccccggtgcctcagagaacctgaacatcttcgacgccgacctggatcagcctgactcgttcacccccgctatagagggctgtgtgggcgtgtttcacatcgtgcaccctatggaatgggacgagactgaatccgaggagacgaagaccaagcgagtgattggaggactgcttgcgatcctcaaggcttgtctcgatagtcccactgttcggcgattcatgcacacttcctcttcttctgccgtggtgtttgatggaaaggatctggacacgcgagatgaaacatcgtggtcacatctcgacctgatgcgaaacatgggccttcagggcaactcctacaccattaccaagactctcgcagagcgaactgctctcgagttcggaaagcagcatggtctggacgtgatctctttggtgccttcgtgggtccatggcccattcttcacgccgcgatgccccaacagcgtgctcgtgttcctggccttgattctgggcgacgaaaactactataagttccttatgaaggcaagtgtcgtccacgtcgacgacgtggctcgagccttcgtccatctctttgagtgccccgaggccgagggacgatacatttgttctgccttggaagttaccattgaggagctgtcagaatttcttagtcagcgatatcctcagttccacattcccaccgctgatagctttaagggtattgagcccgtcaaactgtgcggtctctcgtcgaagaagctgctcgagaccggattcaagtacgaatatgggctggaagaaatgtttgacggagccatccatagttgcaaggagaagggtattctctac

SEQ ID NO: 1325 - DNA, 999 bp, Unknown
  Nepeta cataria or Nepeta mussinii
atgggagaagaaaccaacatgaagggcaaagtctgcgtgaccggcggtacaggattcctcggatcgtggatggtgaagcgtcttctccagcatggctactccgtgaacaccacaacccggatccaagccggagagaaaaagcgcaacatcgactacctcagaaacttggccggagccagcgagcggctccacatttttgacgccgaccttgatcggcctgagtccttcagtgctgccatcgagggctgtgttggtgtgtttcacgtggcccaccctcttgatttcgaggaacgagagactgaggaggtgaagatcaaacgagtcgttaatggtacggtcggtatcctccaggcttgtgtagacgccaagacggtgaagcgagtggtttactgctcgtcggtggccactgcagtgttcaacgacaaggcagctacactggacaagatcgacgaatcatcatggaccgatgtagagtttctgcggtctcttggcgtgttcggcggagcctactcggttactaagaccctggtcgagcagactgtgctggagtttggagagcgaaacggtctggatgtggtggctattctgccatcgtggattcacggtccctttatctcgccgtactgccccgattccgtcagcatctgtatggctctcattcagggcgataagaagtcttaccagagactggtgagaacatctctggtccacgtggatgacgttgtcagagcccatatccacctcttcgagtacccccaggcgaagggtcgctacatctgctccaacgtggatatcaccattgacaagctccacgagttcctgaaagctaattaccccgagtacaagctgccgtccactgaagagttcgaggaccttattcctgtcgctttccccgagctttcttccaagaaattgctggaaaccggcttcaagttcgaaaacggactacaggagatgttcgacggcgcaataaagtcttgtaagaagatggggcttttg

SEQ ID NO: 1326 - DNA, 957 bp, Unknown
  Nepeta cataria or Nepeta mussinii
atggcggaaaagggaaagtgcgtatgcgtcacaggcgctggcggttacgtcgcttcttggctcataaacctgctgctctcgcagggttacaccgtgcatgccaccctgcgaaaccccggtgacgagaagaacggacacctccataaactcgagaacgccccccagaatctgaaactgttcaaggccgacctgttggatttcgattccattctcgctgccgttaaaggttgcgacggtctgttccacgtcgcttctccagccccgccggcttcggtccccaaccctcaggtcgagattgtggagcccgctgttaagggcactctgaacgtcctgaaggcctgtttcgaggcgtccgtatgccgagtcgttattgtgtctagcggtgtggcggttttcatgaaccccaactggccaaaggacaaggtgcttgacgagtcttgttggtccgacgccgaattttgcgctcgtactaataattggtattgttactcgaagacggcggccgaggcagaggcttggagctacgccgaaactaatggcttggtgctagtctcggtgtgtcccacgctagtcttgggaccaatgctgcagcagacgcccaacagttcgtctctgatcctcctgaagctcctcaaggaaggttatgaggtgaccgaggaccacgacagggtgatcgtggacgtgcgagacgtcgccgaggctatgaaactggtttatgagaaccgggaagccaagggtcgatacatctgtacatcacatacaattaagaccagggacctggtccagatgctgaagcaaatataccctaattaccactaccctaagtcatttaaagagggaaaagaacttcctcagctgtcttctggaaagctggaaggccttggatggaagtacaaacccttggacgagacactggtggactctgtggagaactacaagcagataggactactgatg

SEQ ID NO: 1327 - DNA, 987 bp, Unknown
  Nepeta cataria or Nepeta mussinii
atggagaaatccgtgaaggtctgcgtcactggaggcgccggctatattgcctcattccttatcaagcacctcctgcttcgcggatacaccgtccatgcaaccctccgggacctgggtgacgacagcaaggtcggcctcctgaaacgtctcgatcacgccgaaacgcgccttaaactgttcgccggtgacatgtacaacccgactgaatttgctgatgctatttacggctgcgaattcgtgttccacatcgctacgcccatgcaacacactgagggctctcagtacaagaatacctgcgaggcagctgtcgctggcgccaagatgatcgccgaatcctgtatcaagtctcgaaccgtcaagaagctcatttacaccgcgtcggtcaccgccgcatcccccttgaagggggacgcttctggatacgaggatgtgatggacgagacctgttggactccactgaaccactctttccagctacattacgactacgtaaacagcaagaccttggcagagaaggaagttctttcttacaatggcgcgggcatgggagtcgtttcactcgcctgcggtctggtgggcggtgagacgattcagtcctttgcctccggatcgatggcggtgcttatttctcaagccacaaacgatggtaccctgtacaaggcactccgcgaactagaggatctggactccaaggttccaatcgtgcatctgcaggacgtgatggaggcccacatgttcgccatggagaactctgatatgaacggccgattcctagttgcttctgattttctgaagtctgctcagatcgcctccctaatccaaaagcattaccctcatattaacatttcctctcagctgatcgaggacacaaagcgagaaacgaagtggggttcacgaaagttacaggatctgggtttcgagtacaagtgtgatgctgacaagattatttacgggagtatcgtgtgtgctaagaagttcggactcatt

SEQ ID NO: 1328 - DNA, 960 bp, Unknown
  Nepeta cataria or Nepeta mussinii
atggctgagaaagacaagactgtttgcgtcacgggtgccggcggcttcgttgcctcctggttggtcaagcttctgctatctcagggatacacagtccacggtaccgtccgaaaccccggcgatgagaagaacgcgcatcttaaacggctggacaacgctgcagagaacctcaaactgtttaaggccgacctgctagattttggttcaatcatcgaggccgtcaaaggctgcgtcggcgttttccacgtggcttgcccggtgccgggttcgtctgtccctaaccctgaggtagagttagttcagcccgcactgaatggaaccctgaatgtgctgaaagcctgctctgaggtgaaagtgggaagagtggttgttgtctccagtgtggctgcagtttcgatgattcgggactggccgaaggatcaggttatggatgaaaactgctggtcggacaaggagtactgcaaggaaaccaacaattggtactgttattctaagacggtggctgaggcggaggcctgggagtactctaagaagaacggtcttaacatcgtgaccgtctgcccaacactggtccttggtcccatgctccagcacatggctaacgcttcgtctacgtctcttattacaatgcttaaagagagtatctctgatatcgaaaacaacctccgaaaaatcgtcgacgtccgagacgtcgccgaggctctcaagctcgtctacgaaaagccggaagccgagggtcgatacatttgcatggcgcatatgattaagaacgccgatttgatggacatgctgaaaatcttttaccctaactacgactacccgaacgacgttaaggagggtaaggacgaaaagaaggtctcctctgagaagcttcaaaagctgggatggaagtttaggcccttgaaggagactgtggtggacagtgtggagtcttataagcagctgggcttcttgtggtcc

SEQ ID NO: 1329 - DNA, 987 bp, Unknown
  Nepeta cataria or Nepeta mussinii
atgtccattgccgctgctaagaccgtctgcgttaccggcgcttcgggatacattgcgagctggatcgtgaagttcctgctgcagaagggatacacggtgaaggcctctgtgcgtgaccctaacgatcagaagaaaacccaacacctcttggccctggacggtgccaaagagcgcctccacctgatgaaggccaacctgctggaagagggatccttcgactctgtcgtggacggctgtgacggcgtgttccatactgcttctccattttaccacgctgtcactgacccgcaggtggaactgattgagcccgctgtcaaggggacactcaacgtgctgggctcctgcgccaaggttccttcggtgaagcggattgtgctcactagttctattgccgccgtagcctacaatggcaagccgcggactcccgaggtcgtggtcgacgaaacctggtggtctgcgcccgacgtgtgtgagcagatgcagatgtggtacgtgctctccaaaacgctcgcggaagacgccgcctggaagtttgttaaggagaagggcattgagatggtgaccatcaaccccgccatggtcatcggcccccttctgcagcccaccctaaacactagctctgcggctattcttaacttgatcaacggcgcagagacttaccctaactcgacgttcggctggatcaacgttaaagatgtggcacgagcacacatcctggcgttcgaaaacacgagcgcttcaggacggtactgtctggtcgagagtgtcgttcatacgagtgaggttgttaaaatcctccacgagctttaccccacttacaaattgccagataagtgtgctgatgacaagccctttgtgccaacctaccaggtctccaaggagaaggccaagtccctcggtattgagtttactcctctcaaggagggtattaaggaaacggtcgagtctctgaaggagaaggatatgtttaaaccctcggcagccgtt

SEQ ID NO: 1330 - DNA, 930 bp, Unknown
  Nepeta cataria or Nepeta mussinii
atggcagagaagtccaagatcctgatcatcgggggaaccggctacattggaaaatttattgtggaggcctctgcaaagtctggccaccctaccttcgcattggtacgagagtctgctgtttctgatcctgccaagagccccttgattcagggcttcaaggattctggtgtgactatcctcattggagatttgaaagaccatgagtctctcctgaaagccattaagcaggttgatgtggttatctctactgttggccaaatgcaactcgacgaccaggtgaacatcatcgccgcgatcaaggaggccggaaacatcaagcggttcttcccctcggagttcggaaacgatgtggaccgaactagagctgtggagccggccaagtcagccttcgctgcaaaggctaagattcggcgagcaatcgaggcccagggaattccctacacttacgtctcctccaactatttcgctggctacagtctgcccactctggcacagcccggtgctttcgcacccccccccccccgagacaaagttgttatctacggcgatggaaacgctaaagctgtcttcaatggagaacacgacattggtacatacacaatcaaagccgtggacgacccaagaacgctgaacaagattgtgtacatcaagccccctaagaacacttactccttcaacgagttggtggctctgtgggagaagaaaatcaacaagacactggagaaggagtttattcccgaggaacaactgctcaagcaaatccaggagtcgcccattcccgtgaacatcattcttagtataaaccactcgattttcgttaagggcgatcagacctacttcaccatcgagccctcattcggcgtcgaagcctcggagctctaccctgacgttaaatacactacagttgaggagttccttgatcagttcgta

SEQ ID NO: 1331 - DNA, 1032 bp, Unknown
  Nepeta cataria or Nepeta mussinii
atggctgaagaggtctccaacaaacagatcattttcaacgactacattacgggtttccccaaggagtccgatatgatgttgaagacttccaccatcaagctcgaggttccggaaggttgcgacgacgttgttcttgtgaagaacctgtacctgtcgtgcgatccgtatatgcgttcccgaatgagtaaattagatgacaattacgtgcctatattcacccctggaagcccaataatgggctacggggtcgccaaagttgtggactcttgttcgcccaacttcaagaagggcgacctcatttggggcatgatcggatgggaggagtactcgttgattaagtccaccgacggcctctttaagattgagcatgaggacgtgcccctctcgtattacaccggaattcttggcatgcccggaatctccgcgtatgttggcttctacgagatttgttgcccccgtgagggagagaacgtctttgtatccgccgcttctggagccgtcggccaacttgttggccaatttgccaagttgctcggctgttacgtggtgggatcggccggaacccaggacaaggtcgacctcctcaagaacaagttcgggtttgacgaggcctttaattacaaagaggaagtcgatttaaatgcagcactcaagcgacattttccagagggtattgatgtctatttcgaaaatgttggaggcaagatgctggaggctgtcctcctcaacatgaacatgaagggtcggatcgccgcttgtgggatgatctctgactacaacctaaaggaagcccagggcgtcaaaaacctattttccattgtggcaaagcaaattcgaatgcagggattcctcgtgttccattactacagcctgtatccaaaattcctcgacttcattctccccctgatcaagcagggcaaaatcacatacgtcgaggacgttgcggagggtttagagtcggcgcctcccgcacttgtcggtctgttttccggtcacaacgtgggcaagcagctcgtccgagttgtaagtcag

SEQ ID NO: 1332 - DNA, 948 bp, Unknown
  Nepeta cataria or Nepeta mussinii
atggagaagaacgaacgcaaatccaagattctcatttttggcggcagcggctatattggcagctgtatggtgaagggttcgctgaagctgggacactccacctacgtcttctccagacctaactcctctaagaagcacctgcttaacgagttccagtctttgggcgctattattgtgaaaggtaagttggatgagcataacaagctggtctccgtcatgaaggaggtcgacgtagtgatttcagccttggcctacccccaggtgctggatcagttcaagatactcgaggctataaaggaggccggcaatattaaacgcttcctcccctccgactttggggtggaggaggacaagatttccgtgctccccccctttgaggagttcctagacaagaaacgtaagattcgtagagcgatcgaggagtctaagattccttacacgttcgtctccgcagatgtgtttggagcgtacttcatcaactacttgctccacccatacgaccccaacaatcatgagattactgtttacggatctggaagggctaagtttgtgatgaactacgaggaggacatcggtatttacaccattaaggtggcaaccgaccctcgagcttgtaaccgaacagtcatttacagaccaagcacaaacacactgactcagttagagctcatctctaagtgggaaaacaagatcggaaagaagttcaagaagatccatttcccagaagaggaggtggttgctctgagtcaaaaactgcctaaccccgacaatattcccgtggccattctgcatagtatcttcgttaagggtgtgactacttgttacgagttcgcagaggatgacgtggaagcttcttccctctaccccgatatgaaatttactactattgacgagcttttggacatctttctgcataacccgcccaagcccgcgtccgccgctttcgag

SEQ ID NO: 1333 - DNA, 1026 bp, Unknown
  Nepeta cataria or Nepeta mussinii
atggctaaagttgtcttggttactggcgcgtcgggatatctgggaggccgtctttgccatgctctcctgaaccagggatactccgtcaaggccttcgtccgagagacgtcggcactgtcttacctgccgccgccccgggacggcggagatggcggaggatccctccagctggtctacggcgacgttacggactaccccagcctcctcgaggcctttaccggctgtcacttggtatttcacacagcagcactagttgaaccgtggatccccgaccctgcccgatttattagcgtgaacgtcggaggtctgcgaaacgtgctcaaggcctacaaggaaaccgaaacaatcgagaagatcatatacacttcttctttttttgcccttggttctaccgacggttacattgccgatgagactcaggtccaccccgcgaagcatttctgtactgaatatgagaagtctaagacaatttctgataagattgccctcgacgcggccgctgagggcgtccccatcgtgccggtgtaccccggtgtgatctacggacctggaaaagtgaccaccggaaacagtgtcgcccatctgctcgtggaacgattttccggaaggatgcccggatacgttggaaaggagcagggtttctccttttgtcacgtcgatgacgtcgtccaaggccatctcgccgctatggccaagggcaagaagggtgaacgctatcttctcaccggcgagaatgcatcgttcaaggatgtgttcgacattgccgctgacattacccagacatctaagcctcagttccaaatccctctttttctcgtggacgtgtacggctgggtctgtatacttatctcacgaatgaccggaaagcttcccctcatttcgcccccggtcgtggacgtcctgagacaccagtgggcgtactcttgcgaaaaggccaagaaggaactggactacaaccccaggagtctgcgagagggccttctggaaatgctcccttggctcaagtcccttggactgatcaagtat

SEQ ID NO: 1334 - DNA, 972 bp, Unknown
  Nepeta cataria or Nepeta mussinii
atgggcaagattgtgtgtgttactggcgcctctggatacattgcctcttggctggttaagctcttgttgcaccgaggttatactgtgaaggctactgtgcgaaatctatcggatcggtctaaggtggcacaccttaccagtctcgaaggtgctaacgatcgactccacctctacgaggccaacctactcgaggagggctccttcgacacggcagtggacggatgtgagggtgtctttcataccgcctctcccgtgtcactgtctgtttccgacccgcaagctgagttgatcgacccagccgtgaagggtaccatgaacgtcctcaagtcctgcaaaaaggtgtccaccattaagcgagtcgtggttaccagctctatagcgagtgtgctgtacaactacgactctctgaatctaaaacacgatacaatcgtggacgagacctggttctctgaccccattttctgcgaggagaacaaggagtggtacgccctctctaagactttggctgaaaaggctgcatggaagtttgctgaggagaacggactggacctggtcactcttcatcccggctacacaattggtccttctctgcagcctactctaaatatgacctacgtggcattgctcaatttgataaaggagggaaagcagttgctcgccaacggcgtctaccgatacgtggacgtgcgtgacgtcgctctggcacatatcatcgctttagagaatccttcggcgagagggagatactgtctcgtaggacgagtcgcctattctttcgaggctctcgacattctccgaatgatgttccccactctgaagttgccccccatcgagaccaaggaccggccctcgaagcccccttaccacgtgtctaaggagcgagctgagagtctcggagtgagcttccgacccctggaggaatcgcttaaggactctgtcgaaagcttccgggatcgtaacctgattaccctt

SEQ ID NO: 1335 - DNA, 837 bp, Unknown
  Nepeta cataria or Nepeta mussinii
atgtctaccaagatggctgaagcgctcgaaccctggtctgacctcgaaggcaagaccgtcatggttaccggtgcttcctccggtcttggtcacgagttttgtttagacctcgctcgagccggctgccggatcgtggctgcagctcggcgtacagaccgcctcaagtctctgtgtgacgaaattaaccggatgcgaggaggaggatcgtgtcgagctatggctgtagaactcgacgtcactgccggtggccccaccattgcagcctccgtcgaccgagcctgggcagctttcggatctatcgataccctcattaacaatgccggtgtcagaggcgaggttaggtcatcgcttgagttgtcggaggaggaatggaactctgtggtcaagacaaacctgaacggctcttggctcgtatccaagtacgtgggagagaagatgcgcagggggggtggaggaggaagtattattaacatctcgtcgatctcaggcctgaaccgagcgcagcttcgaggcggaattgcctatagtagttccaaggcaggcctcgactctatgacaaagattatggctctggaactgggcgaccacaacatccgcgttaactcaatcgccccgggacttttccgctctgccatcaccgaagacctggtgaagaaagactggctgaagaacgtcgccgaacgatccgttcccctccggactttcggaacgtctgaccctgctttgacctcacttatccgatatttgattcaccactccagctcttacgtctccggaaacatctttattgtcgatgctgggtatactctccctggctacccaatcttctcctccctg

SEQ ID NO: 1336 - DNA, 1032 bp, Unknown
  Nepeta cataria or Nepeta mussinii
atggaggagaacctggtaggcaacaagcagatcatcttcaagggctacatcgagagagtccccaaggaatctgatatggaattgaagttgggcaataagattaaactcgaggcccctgagggatctggtgctttcctcgttaagaacctgtacctctcctgcgacccctacatgcgaggtcgaatgcgagattttcacggatcttacatacccccctttctaccaggcagcgtggtggagggattcggtgtttcaaaggtaatagactctgataaccctaacttcaagccgggcgacatcgtctctggctttaccggttgggaggaatactccctgcttcacaacacagagcagctgcggcgagtggagcccgacaacatccccctctcctatcacatcggcttgcttggaatgccaggattcactgcctacgccggcttctacaaagtctgtgaccctaagcgcaacgagcatgttttcgtctctgccgcgtcgggagctgtgggacaactcgtcggccaactcgctaagttgcacggatgctacgtcgtgggctccgccggttccgaccaaaaggtggacctgctaaagaaaaagctgggtttcgatgaggcgttcaactacaagcaggagcctgacctggacgccgccctcaagaagtatttcccagagggcatcgacatttacttcgagaatgtcggtggcgccatgctggaagctgtgctgctcaacatgcgagttcatggacggatcgcagtctgcggaatggtctctcagaacggaatggacgaacagggaatcagaaacctgttttcgctcatccccaaaagagtgcgcatgcagggtttcctgcagtctgactacctccatctgtttcctaagtttgtagaagaggtcggaaacctgtacaaagaaggtaagattacatacctggaagacatgaaccagggcctcgagagtggcccctgcgcattcgctggcctgtttagtggaatcaacatcggtaagcaggtcatctgtgtgtcgcctgcc

SEQ ID NO: 1337 - DNA, 963 bp, Unknown
  Nepeta cataria or Nepeta mussinii
atggccgataaggagggagaggttgtatgtgtgacaggaggtagcggatttattggatcttggctggtgtcccttctcctccgacgaggatactcggttcgcgccacagtgaaaaacctcggtgacgaaagagagactaagcaccttgaggcgatcgagggagctgactctcggctgtcgctcttccagattgatctgttggactacgactccgtggctaccgccgtgggagacgccgcgggagtcttccatcttgcttctccctgcactattgatcaggtcaacgaccctcagagagagctcttggaccccgccatcaagggcacgctgaacgtgctcaaggctgccaagaacctgggcgtcagacgagttgtcgtgacttcctccatctccgccatgattgcttcgagtaactctctggccgagacaggagaggactgttggattgatgaggactattgccggcagaacggactgtggtaccccgtgagtaaggctctagccgagaaggccgcctggaaactcgctgaagagaacggcttggacatcgttgtggtaaaccccggcatggtggttggacccattctaccgcccgctctgaactcctccatgcagctgatgctgcacgtgttgcagggcaaagactttttcgagggattttttatgggcttggtccatgtaaaagatgtggctctcgctcagatactgctttacgagaacacctcggcctctggacggcatctctgtgttgagtccctatcgcgatacgatgattttgctaagcaaatggagaagctctaccccgaatacaagctccctcgattcagcaacaacgctcaacacggatcactcaagagcgatgccgcgcttaagaagcttcgtgacctgggcattgagttcgcacctctggagcagattgtgaaggattctatcgagagccttcgttccaaaggctacatttcc

SEQ ID NO: 1338 - DNA, 945 bp, Unknown
  Nepeta cataria or Nepeta mussinii
atggctgacgctgtcgtccaacccgccgctcagcgatatgccctcataaccggcgcgaacaagggaattggattccagatttgccgacaactcgagtctaagggtatcgtagttatcttggcctcccgagacgaaaagcgaggaattaaggcccgagaaagactcctaaaagagttcggcgtgagttccgataatgtcgtcctgcaccagctggacgtggttgacccggcaagcgtggctgctgtttacgagttcattgaatctagattcggccggctcgatatcctcgtaaataatgctggaatacgcggcgctgacgtcgacggcgatgtgtcgttgctagaagagtacattaaggccgacggcgctactatcagcgccggtggtaaggctgagcccttccatcccaaagccaacggccggctcgtcgagactttcgagaacgcagaggaatgtattgagaccaactactacggagccaagcgcgtcactgaggccctgctacctctcttgcaccagtccgacagcccgcgaatcgtgaatgtgtcttctcttctggggtcactggtgttgcagacgaacgagcgagcaaagggtgttttctctaacgaggagggcctgacccaagacaaggttgatgaggtcgtccaagagtttctgaaagattttaaagagggaaagcttgaggagaataactggcctcctcatttccctgcgtacaaggttagtaaggaggctctcaacgcctacaccatgctcctggccaagcggaatccttctttctgtaccaacgccgtgtgccctggattcagtcgaacagacatgaccttcaactctggcctgatcagtgagtcggaggctgccgaggcccccgtcaagcttgccttgctgcccgatggaggtccgagcggttcatttttctaccgggaggaggccctctcactt

SEQ ID NO: 1339 - DNA, 930 bp, Unknown
  Nepeta cataria or Nepeta mussinii
atgaaggcctggacttacaaggagtatggcggcattgaggtgctcaagctggacagtgatgtgccaattccggaacccaaggcggaggaggttctgatcaaggtagcggctgtgggcctcaacccaattgatttcaagagacgactgggattttacgaggcagacagagcccctttcccggtggtgccgggatacgacgtggccggcgttgtggtgaaggtcggtaaccgagtgatgaacttcgaagagggtgacgaagtttacggtgacgttgtggagactgccctgcaggatccccgttccctagggaccctggcggagtatacgatcgctgaggagaagctgctggccctgaagccccggaatctggattttgctgaagcggcctcgttgcctgtcgctatccagacggcctaccagggtctagagcgtgctcgattctcggagggaaagtctatccttgtccttggcggcgctgggggtgtcggttcgcttgtcatacaggttgcccgctatgttttcggcgcttctaaaattgccgccacctgctcgacagcgaacatggaccttgttgagtccttgggcgccgacctcgtgatcgactatagtaaccacaattttgaaaattatcccgacaagttcgacgtcgtcttcgacacaatcggccagtctgacagagccactaaggccctgaaagagggaggatgcgtggttgtgatcgtcggcgagcacgtggatccccctatgttctcttttaccctaactgcttccggagagtacctcaatatgttgaacccctacctcgagaccggcatgctgaagcctgtcttagaccccaacggcaccttcccatttgaccaagtgaacgaggccttctcatatttagagagcaacagggccataggcaaggtggttgtgtatcctatttca

SEQ ID NO: 1340 - DNA, 549 bp, Nepeta cataria
atgagcaagtccttgggcttcatgaaatcggttaggccaatcgccctacccttaatttgcttgagtgaacttatctccacccccattattttggatgctcctagagcactcgccccaagtactacagcaaaccccaccgcaccaagaccgaagacggcaactgtagatccatctagtacatcagctgtattccatactgcccctagacctgtagaaacaccacaattaagccgtgttatcttctcaaaagaagcattacgttccattctaacgacacaagccgaatccagtactgtttattctttaaacgtggaagttttaagaaaatggaaaattggatttccgtcatttgttgagaacaggcactttccgtccccagttatggtattgtttataggctttacattgtacttctggcataagctagtcttttttgatttacagtatacacaattttggcactctccactcaaaataggcacgatgtggtcaccaataagtatttcacttactccctcaccaacgctatctacgacaccagaggccagt

SEQ ID NO: 1341 - DNA, 564 bp, Nepeta cataria
atgtcttcaatccctcagcgtcttgcaatggattttccaaccagcataactaaacgttatcttacatctgatcttgcctctcgttcaatcgcagtcttcactagctcgatgccgattagttcaatgtctgctgttatgccttgttttcctcaaaagtcgaatatctcctgcgtatcctttactcctccaaagtccttgcccccaatgagttttcgtccagctactcgtggtaaaatcggaagaagtagaggtttattgggtaaccctacggtgattagctttccgtttatttttaacagattatctaacggggtcaactggtgcactgcagcaatggtatcaatgatgaagagcatcgtgccagtcgctgcattttcttgttctgcctctgtactaactactaaggcatctgcaccatctctttttatggcttcaatttttttttttggcgatgttctgatcacggtgacatttattcccaaagcatttcctaatctaacggctacatggccctccccaccttcgcctgctacaccaaaatgttttcccgctagtgttattcca

SEQ ID NO: 1342 - DNA, 564 bp, Nepeta cataria
atgtcatcatccccacaaagattagccatggattttccaacttcaattactaagaggtatttaacgtctgacctggcctcacgatctatagctgtatttacatcttctatgccaatttcatcaatgtctgctgtgatgccctgttttcctcaaaagtctaacatttcttgtgtgtcctttacgcccccgaaatctttaccaccgatgagctttcgcccagccactaggggtaagataggcaggtcccgcggtctgttgggtaatccaacagttatttcttttccatttatctttaatcgtttgtcaaatggtgttaattggtgtactgctgcgatggtctctatgatgaagtcaatcgttcctgtagccgctttttcctgttcagcatcagtattgactacgaaggcttcagcaccaagtctattcatggctagtattttctttttcggtgatgttctgataaccgttacttttatcccgaaggcttttccaaatttaactgcaacatggccatcgccaccaagccctgcaacaccaaagtgctttccggccagcgtcatccct

SEQ ID NO: 1343 - DNA, 1146 bp, Nepeta cataria
atgtcgtctacaaaaggccaagtaatcagatgtaaagctgctgttgcttgggaggctggaaaaccactagttatagaagaggtggaagttgcacccccacaaaaaatggaagtaagggtgaaaatactatttacgagcctttgtcacacagatgtttatttctgggaagcaaaagggcagacaccattgtttcctagaatttttggtcatgaagccggtggtatagttgaatcagttggggaaggtgttaccgaactggcacctggtgatcacgttttacctgtctttacaggggagtgcaaagaatgtcgacattgtaaatccgcagagtccaatatgtgtgatttgttgcgcattaacacagataggggagtcatgattgaagatggtaaatccagattttcgaaggatgggaaagaaatctatcatttcgtagggacttctactttttctgagtacacggtagttcatgtgggttgtttagctaagattaatccagcggctccaatggataaagtttgcattttaagctgtggtatatcaactggattaggtgcctctttgaatgttgctaaaccaacgaagggttcaacagttgctatcttcggtctgggagctgttggcttggctgcagcggaaggtgctaggatagctggtgcttcaagaatcattggtgtcgatctaaatgccaacaggtttaatgaggctaaaaagttcggggttaccgagttcgtgaatccaaaggatcatgaaaagcccatacaggaggttttagtagaaatgaccgatgggggagttgaccgctctgtagaatgtactggtaatgtgaatgcgatgatcagcgcatttgaatgcgttcatgatggctggggcgttgctgtgttagttggtgttcctaataaggatgatacgtttaagacacacccagtaaatctcttgaacgaacgaactttgaaaggcactttcttcggcaattacaaaccaaggacagacatccctgtagtcgtagaaaaatatatgaacaaggagatggatttacaacttgaaaagtttatcacacatcgtattagcttcagtgagattaacaaagcctttgactatatgttgagaggtgaatcaattagatgcattattacaatggaaaac

SEQ ID NO: 1344 - DNA, 981 bp, Nepeta cataria
atggaagtcagaattagagttctcttcacttcgatttgtcatacggatctgtctgcgtggaagggcgaaactgaggcccatcgcgtataccccagaatattcggacatgaagcatcgggtgttgtcgaatccgtcggtgaaggtgtctccgatattgagattggtgaccacatagtgccaatttttaacggtgaatgtcaaaactgtgtttattgtaaatcaaagaagacgaacttgtgtcaaaaatatcgtgtgaacccaatgaaatcgactatgactggtgatggtaagtgtaggttttccacgaaagagggtaatccaatttttcatttcttgaacacttcaacattctccgaatatactgtactagatagtgcgtgtgtagttaaaatagaccgcaaagcctcacttgaaaagatgacacttttgtcatgtggggtctctactgggttgggtgcagtttggaatactgccgatgttgaggagggtagcactgtagccgtgtttggcctcggagctgttggtcttgcggtggtggaaggagctagagctagaggagcatccagaattatcggtgtggacattaattccgataaacaaattaagggtcgcgcaatcggactaaccgacttcattaaccccaaagatttagatatcccagttcatcagaaaataagagaaatggccaacggaggtgtcgactactcctttgaatctgcgggtaatttagatgtccttagagaagcgtacttatccactcacgatggttggggttttactgtgattttgggtattcatccaaccccaaggatgctcccgcttcaccccatggaattatttgatggtagaagaattgtggcctcggttttcggagattttaaaggtaaatcccaactcccacattttgccaatcagtgtatcaagggcgaagttaagcttgatgaattcattacacatgaaatcgatagaaagtccgtggtg

SEQ ID NO: 1345 - DNA, 720 bp, Nepeta cataria
atgaaatcgactatgacaggcgatggcaaatgcagattctccactaaagaaggtaaccccatttttcatttcctaaacacttcaactttctctgagtatacagttctggatagtgcctgcgttgttaagattgataggaaagcttctttagaaaaaatgacattattgtcatgtggagtctctacgggccttggcgcagtatggaatactgcggacgttgaagagggatccactgtggcagtttttggtctaggtgctgttggattggcggtcgtagagggggctagagcaaggggtgcttctagaataattggagtagacattaacagtgacaaacaaataaagggacgtgcgatcggcctaactgatttcataaatcctaaggatttggacatcccagtacaccaaaaaataagagaaatggccaatggtggtgttgactattcttttgagtctgctggtaacttggatgtactgcgtgaagcatacctgtcaacccatgatggttggggtttcacggtgatattaggtatccaccccacgccaagaatgctacctcttcatccgatggaattatttgatggtaggagaatcgttgcatctgtctttggggattttaaaggcaagagccagcttccacatttcgctaatcaatgcattaaaggtgaagtcaaacttgatgagtttatcacccatgaaatagatagaaaatccgtggtg

SEQ ID NO: 1346 - DNA, 843 bp, Nepeta cataria
atgccatgtggtagttgtttcttttgttctaaaggtcaagatgatctatgtgagtcgttttttgcatataatcgggccaagggaactttatatgacggggaaactagactgttcttacgtggttcaggtaaaccagtttatatgtattctatgggcgggttagcagaattttgtgtggtaccagctcatggtctcacatctcttccaaatacattgccatacactgaatctgccgtattaggctgtgccgtctttactgcatacggcgcaatggctcacgcggcccaggtcagacccggtgactctgtcgccgtaatcggtataggtggagtgggaagctcctgtttacaaattgcaaaagcttttggtgcttctgaaatcatcgctgttgacgttcaagatgagaagctggagaaggctaagatcctgggcgcgacccacgccatcaattcaagaaaggaagacgcggttgccaagatcaaagaaataacaggcggcagaggcgtcgatgtagctgtggaggccctaggtcgacctcagacattctcccaatgtgttcaatgtgtccaggacgggggtaaggccgtgatgattggcctaaccttaagtggtgcgaaaggtgaagtagatataaatcacttagtgaggcggcaaattaaggttattggatcgtacggtggccgagcccgtcaagacttgccgaaattagtcaaattggctgaaaaaggcacctttaacttgcaagctgcagtttccaggaaatataagtttgaagaagttgaggaagcgtataaaaatttggatcaaggatcgattgtaggtagaggtgttgtggaaattatg

SEQ ID NO: 1347 - DNA, 1065 bp, Nepeta cataria
atgggttcgcatggagaggaagaaaacatggcagcatggctactggggattaacaatctgaaaatacttcctttcaaattacctttgttaggtccgcatgacgctaggatcagaatgaaagccgtgggtatttgtggttctgatgttcattacttgaaagaaatgaaactggcagattttatagttactgaacctatggtgatagggcatgaatgtgcaggcatcgtcgaggaggtcggagctgaagttaagcatctcgtgccgggtgacagagttgctatcgaacccggaatttcttgctggagatgtaatctatgcaaggaaggccgttataacctttgcccagaaatgaaatttttcgccacgcctccagtccatggttctcttgctaaccagatcgttcatccagcagacttatgtttcaagttgcccaataacgtgagcttggaagagggggctatgtgcgagcccctatctgttggtgtgcatgcatgccgtcgtgcaaacgttggtccagagaccaacgtcttggtaatgggggctggtccaatcggtttggttaccttgttgtcagctagagccttcggttcgccgcgtatcgttattgttgatgtagacgatcatagactgtctgtggctaagtcattaggtgcagatgaaactattaaggtaagtacgaacgtcaacgatgtgggtgctgaggttgaatgcataaaagccgcaatgggtggaactatagacattgcacttgattgcgcaggtttttcaaagaccatgagtacagcgctggctgcgacttctagtggtggtaaagtgtgtttggtaggcatgggccatactgaaatgacggtgcctttggcccctgctgccgttagagaagttgacttggttggaatttttcgctataaaaacacttggcctttgtgcattgaattcttgcaaagcggcaagattgacgtgaaaccactcatcacgcatcgttttggttttagtcaaaaggaagttgaggatgcttttgagacatcagcaagggggggaaccgcaattaaagtaatgtttaatcta

SEQ ID NO: 1348 - DNA, 1065 bp, Nepeta cataria
atggctaagagcgttaatgcagtcggttgggcggcaagagacacctcgggtgttctgagtccacttaagtttgcaagacctgctgctggcgacagagacgtgcaatttaaagttctttattgtggcatatgccattccgatctacattccatcaaaaatgaatggggacacacacaatatcccattatacccggtcatgaaattgtaggtgtcgtgacagccgtagggccgaaagcaaccaaatttaaagcaggcgataaagtcggagtaggatgtctagtcaacagttgccgtaattgtaatcaatgtgcagctgatcttgaaaattattgtccaaagattgtccaaacttataactctgtacttgctgatggtagcgttacttatggtggctatagtgatgtgatgactgcagatgaagacttcgttatcaggtggccggaaaacttccctatggataaaggtgcccccttgctttgtgccggtgtaaccacttactccccattgagatattatggtttggacaaacctggattacatatcggtgtggtgggactgggcggtttgggtcatgtggccgttaaattcgcgaaggcttttggtaccaaagtcacagtcatctctactagtgctgggaaaaaaaaggaggctattgagacccttggcgctgatgcattcctaatatccaaagacgcatcagaaatgcaagctgcagctggtaccttggatggcatgattgatacagtctccgctcaacaccccttaccacctctattgtcattattgaaaccacatggtaagttaatactggttggtgccccagagaagccattagaattaccagcatttccattattgatgggtcgaaagatggttgctggaagtattattggtggtataaaagaaactcaggaaatgatagactttgccgctaagcataatatcttgccagacgtcgaaatgattcctatggattatgtaaataccgcgatggagagattggcaaaggcagatgtaaaatataggtttgttattgatgtcggtaatactttaacaaaagctgat

SEQ ID NO: 1349 - DNA, 1077 bp, Nepeta cataria
atggctaagaccccggagacagagcacccagttaaagcttttgggtacgccgccacggataattcgggtaccttctcaccattcaagttctctcgtagggctacaggagaacgggacgtacagttcaaagttttatattgcggcgtatgccattctgatttgcatatggtaaaaaacgaatggggtgtcacacattatccaattgtccctggtcatgaaattgttggtgtcgctacagaagtaggttccaaagttgagaaagttaaggtcggcgataaggttggtgtgggtgtgattgtaggttcttgtcgtcaatgtgatcaatgttctaatgatttagaaaattattgtagcaagcaaattttaacatatggtgctccgtacctggatggcacgattacaaggggcggttattcggacattatggttgccgatgaacatttcatcatccgctggccggagaattttcctttagatgcgggtgcaccattattgtgcgcaggcattaccacttattcacccctgcgctacttcggtcttgacaaaccaggcttaagagttggtgtaaatggtctagggggtctgggtcacgtggcagttaaatttgccaaggcttttggtactaaagttacggttatctcatcgagtttgagaaaaaaaaaagaagcggtggaaaagttaggtgtagacgaatttctggtatctactgatcctgaacaaatgcaagccgcaattggtaccttggatggcatcattgacacagtgtctgccgaacattccgttgtatcattattgtcattgcttaaaccgcatggaagacttatcgtagtgggtgctcctgaaaagcctcatcaattacccgcttttccattgattactggaagaaagtccatctccggatcggccatcggtggtatgaaggaaactcaagaaatgatagatttcgccgctaaacataatattctgccagatgtagaagttattccaattgactatataaatacagcaatggaaaggcttttgaagtccgatgtgaaataccgcttcgttatcgacgttgaaaaatctttgaaagct

SEQ ID NO: 1350 - DNA, 948 bp, Nepeta cataria
atgtatcctgttgtccccgggcacgaaattacaggtataattactaaagtagggagtaatgtcaccggttttaaagtgggggatagagccggcgtgggatgcctggctgctacatgtcttaagtgcgagtgctgccaggaaggtcaggaaaactattgcgacgacgttcagttcgtgtataatggtattttctgggatggttccataacttacggaggttacagtgacttcttagttgcagatcatagatatgtggttagagtgccggaaaatttaccaatggatgctgccgcccccttgctatgtgctggaattactgtctatgctccaatgaaggacaataatctacttgaaacaaagggtaaacacgtgggtgttgtggggttgggtggcttgggacacattgctgtgaagtttgctaaagcttttggtcaccatgttaccataatttctacatctccgtcgaaagaaaaggaagccagggaaaagcttggagcggacgacttcatattatctactgatgcaaagcaaatgatgactaaaaaaaggtctttggatttcattttagatacggtttctgcaaagcacagtttgggaccattgctagagctcttaaaagtaaaaggtactcttgttatcgtcggtgcacctgaaaaacccatggatttgcccagttttccccttatatttggtaaaagggtggttaaaggttcgatgatcggatctattaaagaaacccaagacatgatggatgtatgtggaaaacataatatcacgtgcgatattgaagtcgtgaatacagataacattaacgaggctctagatagattggctaaaaacgatgtaaagtacagattcgttatcgatattaccgcgaaatcgacccctaagcgttctgaggaaaggagagttggaaaggagtgtaggtctaggtggagtccatatcat

SEQ ID NO: 1351 - DNA, 624 bp, Nepeta cataria
atggccgaatttcaacagaaggcctttggattggccgccaaagattcttctggcgtgttatctccgtttcatttttctaggagagataatggtgctgacgatgtgaccataaaaatattatattgtggcgtgtgccactctgacttacacacagttaagaatgaatggggctttacacaatacccagtcgtaccaggtcatgagatctctggtctggtcacaaagattggtaacaacgtcgagaagttcaaggttggtgacagagtaggcgtaggtgttattgttggttcctgtcgtacttgtgatctgtgccagcaggatttagaaagctactgtccaaaaatgatattcacttataatgcaactgacaaagatggtaccagaacctatggagggtattcggacattatcgtggttgatcagcactttgtaattaggtttcctgacaatgtaccatctgatgcaggcgcccctttattatgcgcggggattacagtatattctccaatgaaatattacggaatgactgaagccggtaagcatctgggtgtggccggtttgggtggcctcggtcatgtagcggtcaaattcggtaaagctttcggagacagaaagagtgtagtt

SEQ ID NO: 1352 - DNA, 1065 bp, Nepeta cataria
atggcgaaatcagttaacgctgtgggatgggcagctagggatacttctggtcttctatccccgttaaaattcgctagacctgcagctggcgacagagatgtgcaatttaaggttttgtactgcggtatatgtcattctgaccttcactcaataaagaacgaatggggaaatacacagtatcctatcgttccaggtcatgaaattgtcggcgtggttacggcggtaggtcctaaagctacgaagtttaaggccggcgataaagtaggggttggttgtctcgttaactcttgtagacattgtgatcaatgtgctgctgatctcgaaaactactgtccacagttagttcaaacctataattccgtattagctgatggtagcgtcacgtacgggggttactctgatgttatgaccgcagacgaagactttgtaatcagatggcctgagaattttcctatggataaaggtgctcccctattatgcgcaggtgtgactacctattcacctctgagatattacggactagataaaccaggcctgcacataggtgtggtcggcttaggcggattaggccacgtggcagtaaagtttgcaaaagctttcgggactaaagtaactgtcatatcgacttcggccgggaagaaaaaagaagcaatagaaacgttgggggcagatgcattcttgatctctaaagatgctagtgaaatgcaggctgccgccggtactttagatgggatgattgatactgtttctgctcagcatcctctgccgccattattgtctcttctcaaaccccatgggaaattgattctagtcggcgcgccagataaaccacttgagttaccggctttccctttaataatgggacgtaagatggtagctggttctatcataggtgggatgaaagaaacgcaagagatgatagactttgcagcaaagcacaacattctaccagatgtagaaatgattcccatggattatgtaaatacagccatggagaggcttgctaaggcggacgtcaaatatcgatttgttattgatgtgggaaataccttgactaaggcagat

SEQ ID NO: 1353 - DNA, 894 bp, Nepeta cataria
atgtatccagtcgttccggggcatgaaattacaggcataattacaaaggtggggtcgaatgttactggtttcaaggttggtgacagagcgggcgttgggtgtttggctgctacctgtctaaagtgcgaatgttgtcaagaagggcaagagaattattgtgatgatgttcaatttgtatataatggtattttttgggatggtagcataacttacggcggttattctgattttttggttgccgatcacaggtatgttgtgagagtaccggaaaacttaccaatggatgccgccgctcctttgttgtgtgcgggcattactgtgtacgcccctatgaaggacaacaatctactagaaacaaaggggaaacacgtaggtgtggttggattaggtggtttgggtcacattgcagttaaatttgcaaaagcctttggacatcacgtaactattattagtacttcgccaagcaaggaaaaggaagcacgggagaaacttggagctgatgactttatcttgtccactgacgctaaacaaatgatgacgaaaaaacggtcgttagatttcatcttagatactgtctctgccaaacactcattgggcccgttattagaattactgaaagtcaagggtacgcttgttattgtgggggctcctgaaaagcccatggatctgccttcgtttccattaatctttggtaagagagttgtgaaaggatccatgataggttcaattaaagaaacgcaggatatgatggatgtatgcggtaagcataatatcacgtgcgacattgaagtcgtcaatacggataacataaatgaagccttacatcgtttagctaagaacgacgtaaaatacaggtttgtcattgatattgcggccaaatcgtctccaaatata

SEQ ID NO: 1354 - DNA, 1065 bp, Nepeta cataria
atggcaaagagtgttaatgctgtaggttgggctgctcgggacacatcgggtttattgtcgccattaaaattcgctcggcctgctgcaggtgatcgtgacgtgcagtttaaagttctatattgtggtatctgtcactccgatctgcattcgatcaaaaacgaatggggaaacacacaatacccaattgtaccaggtcacgagatcgtaggagttgtgacagcagtcggtccgaaagccaccaaatttaaagcgggagataaggtaggggtgggctgcttagttaattcttgcagacactgcgatcagtgcgcggccgatttggaaaactactgcccgcagttggtgcaaacctacaattcagtcctggctgatggtagtgtaacttatggtggatattctgatgttatgaccgccgacgaagatttcgttattaggtggccagaaaattttccgatggataaaggtgctccgttattatgtgccggggttaccacctatagcccattaaggtattatggcttagataaaccgggtctacatattggagttgttgggctaggcgggctagggcacgttgcagttaagtttgcaaaggctttcggcatgaaagtgactgtcatttctacatccgcagggaaaaaaaaagaagcaatagagacactaggggcagatgcttttctaatttctagggatgcatctgaaatgcaagcagctgccggcactttagatggtatgatagatacggtatcagcccaacatcccttaccaccactgctatctctactgaagccgcatggtaaattaattttggtaggcgcccctgaaaagccatttgaattgccggctttccccttgttaatgggtcgtaagactgtggcggggagtgttattgggggtcttaaagagactcaagaaatgatcgacttcgctgccaagcataatttactcccagaagtggaaatgattccaatggattatgttaataccgccatggagagattggcgaaagcagatgtcaaatacaggtttgttattgatgtggggaacacattgacaaaagctgac

SEQ ID NO: 1355 - DNA, 1065 bp, Nepeta cataria
atggccaaatctgtcaatgcagttggttgggctgccagagatacaagcggcttattgtctccgcttaaatttgctcgtcccgctgcaggtgatagggacgttcaatttaaagtactctactgtggaatttgtcacagcgacttgcattcaataaaaaatgagtggggtaacacacaataccctattgtccctggtcatgaaatcgttggtgttgtcactgccgtaggtccaaaagcaacaaaatttaaggctggtgataaggttggtgttggctgtttggttaattcatgtcgacattgcgaccaatgtgcagctgacttagaaaattactgtccacaactggtgcaaacttataattctgtactggccgatggttctgtaacatatggaggttattccgacgtgatgacagcggacgaagacttcgtgataaggtggcctgaaaattttcctatggataagggggctccgttgctatgtgctggtgttacaacgtatagcccattaagatactacggactagataagccaggcctccacataggtgtagttgggttgggtggattagggcatgtcgctgtcaaatttgcaaaggcattcggcacaaaggttaccgttattagcacgagtgcaggaaagaaaaaggaggcaattgaaacgttaggagctgatgcttttttaatatccaaggacgcgtcagaaatgcaagctgctgcggggactcttgacgggatgatagacacagtgtctgcacagcacccgttacctcctttattatcattattaaaaccacacggaaagctaattctagtaggtgccccagaaaaacccctagaattacctgcatttcctcttttaatggggagaaaaatggtcgcagggtccattataggtggtataaaagaaactcaagaaatgatagattttgcggctaaacacaatattttgcccgacgttgagatgatacccatggactacgtcaatacggcaatggagagattggccaaagcagatgtcaaatataggtttgtgattgacgttggcaacacattgacgaaagcagac

SEQ ID NO: 1356 - DNA, 1065 bp, Nepeta cataria
atggcggagtttcaacaaaaagcatttggtctggctgccaaagattccagcggggttctaagcccgtttcacttttcaagacgggacaacggtgcagacgacgtgactattaaaatattgtattgcggcgtatgtcactctgatctacatacggtaaaaaatgaatggggatttacacaatacccagttgtgccaggtcatgagattagcggtttggtgacaaaaattggcaataatgtcgaaaaatttaaggttggagatcgtgtaggggtcggagtaatcgtaggtagttgccgcacttgtgatctttgtcaacaggatctggaatcgtattgcccaaagatgatatttacttataatgctacagataaggatggcacgcgaacttatggtggatacagcgatataatagtggtggaccaacatttcgttataagatttcccgacaatgtaccaagcgacgccggtgctcccttgctttgtgcaggtattacagtatactccccaatgaaatattatggtatgacggaggcaggtaagcatttaggtgtggcagggttaggtggtctcggacacgtcgctgtaaaattcggaaaagcatttgggatgaaagttactgtcattagcacatcgccgaagaaaaagatagaagctataaataagcttggtgctgacgcatttgtagtctctaccgacgcggaacaattaaaagcagctaccggaacgatggactttattattgataccattgccgccgttcatcagctaacccctcttctgtctctgctgaaaatgaatggtaagttaatcactgtaggtctcccaaataaaccgcttgacttgcctatttttccactagttgctggtagaaaattaatcgggggtagtgatttcggcggtgttaaggaaacacaagaaatgcttgatttctgtggaaagcatggtatcactgctgacattgagctaatcggcatagaagatgttaacacggccatggagagactagctaaaagcgacgtgaggtatagattcgtgatagatgttggtaaatcaattgctaatctt

SEQ ID NO: 1357 - DNA, 513 bp, Nepeta cataria
atgtatcctgtggtacctgggcacgaaattaccggtattattacgaaagttggatctaatgttacagggtttaaggttggtgatagagccggagttggatgcctggccgcgacgtgtttgaaatgcgagtgttgccaggaaggacaagaaaattactgtgatgacgtgcaattcgtctacaatggtatcttttgggatggatctatcacgtacgggggatattccgattttctagttgcagatcatagatatgttgttagagtccctgagaatttgcctatggacgccgctgccccactgttgtgtgcaggtattactgtctatgcaccaatgaaagataacaacttgctggaaacaaaaggtaagcacgttggcgtcgtggggctaggcggattgggtcacattgctgtaaagtttgcaaaggcattcggacatcatgttactatcatatcaaccagtcctagtaaagaaaaggaagccagagaaaagttgggggatagaaagtctgttgtt

SEQ ID NO: 1358 - DNA, 1059 bp, Nepeta cataria
atgaccactgcaaatggcgaatgcattggatgggcagctagagatccatgtggtaccctctctccatatagattctcgagaaggtctgtgggggccgatgacgtttatatctcgattatgtactgtggcgtgtgttacgccgatgttatatggactagaaatgtgatgggacactctaactatcctttggtacctggacatgaaatcgtcggtattgtcaaggaggttggttccaatgtcgatcgtttcaaggttggagaacatattggtgttgggacttatgtaaattcctgccgtgagtgtgaatactgcgataaccagatcgaagttcattgttccaagggttcaatcttgacatttgatggcgtggactttgacggtaccatcaccaaaggtggatatagtagctacatagtagttcaccagagatattgcttcgtaattcctgaaaattacccgccccagttagctgctcccctcttgtgtgcaggtatcacagtttacaccccgatgatgagaaataacatgaatcaaccaggcaagtctttgggagttattggattgggtggtttagggcacctggctgtcaaattcggtaaggccttcggtttaaaagttacagtcttttccacttctatttcaaagaaggacgaggctttaaacttgttaggagctgataatttcgttttgagttcagatgaaaaggaaatgaaagcactcaagggaagcattgatttcataattaacactgcctcaggcgatattagttttgatctttatctatccctactgaagacaatgggagtttttgtcttagtgggctttccctcagaagtcaaatttttaccaggttcgttaaacctaggagccaagaccgtgacaggctccatcacaggtggaacaaagcagacacaagaaatgctggcattctgtgcttcgcacaaaatttatcctgaaatagaattaattcctattcactactgtaacgaggctttggagcgtttagttaaaaaagatgtgaagtatcgttttgttattgacattgccaattctctggcc

SEQ ID NO: 1359 - DNA, 942 bp, Nepeta cataria
atgtactgcggagtgtgttacgctgatgttatttggactcgaaacgttatgggccatagtaattatccgttagttccaggccatgaaattgtcgggatcgtcaaggaagtaggttcaaacgtagataggttcaaggtgggtgagcatatcggagtgggaacatatgttaattcgtgtagggaatgcgagtattgtgataaccaaatagaagtgcattgcagtaaaggcagtatcttgacttttgatggtgtggactttgacggtacaattactaaaggtggttactcctcatatattgtcgtgcatcaaagatattgttttgtgattccggaaaattatcctcctcaattggctgcccctttgctttgtgccggaattacagtttacactccaatgatgagaaataatatgaatcaacctggtaagtcattgggagtgatcggtttaggtggtttgggacatctagccgtaaaattcggtaaggctttcggtctaaaggtaactgttttttccacaagtatatctaagaaggacgaggcactaaacttgcttggtgctgataatttcgtattgtccagtgatgaaaaggagatgaaggctttaaaaggaagcatagactttataatcaatacagcctctggggatatctcttttgacctgtacttatcccttttgaagactatgggagtttttgttttagttggttttccttcagaggtaaagtttttacctggctccctgaacttgggagccaaaacggtgacaggttcaattaccggtggtacaaaacaaacacaagaaatgttagctttttgtgcaagtcataaaatttatcctgaaatagaactaataccaatccattattgcaacgaagcattggaacgcttagtcaaaaaagacgtgaagtacagatttgtgattgatattgctaatagtctagca

SEQ ID NO: 1360 - DNA, 681 bp, Nepeta cataria
atgtatccagtagtacccggccacgaaattacaggtattatcaccaaagttggatctaatgtaactggttttaaagtaggagacagagccggagttggctgcctggctgctacctgtttgaaatgcgaatgttgtcaagaaggacaggagaactactgtgatgatgtccagttcgtttataatggtatcttttgggatggttctattacctatggcggttattctgactttctagtagctgatcatagatacgtagtacgcgtcccagaaaatttaccaatggatgccgccgcaccattgttgtgtgctggaattactgtatatgcgcctatgaaagacaataatttgctagaaactaagggaaaacacgttgggattgtaggtctgggtggattaggtcacatagccgtgaaattcgcgaaggcttttggccatcacgttactattatttcgacatccccatctaaagagaacgaagcacgtgaaaagttgggtgcagacgattttatcctgtctacagatgcaaaacaaatgatgactaaaaagaggtcattggatttcattctggatacggtttcagcaaaacattcgttaggccctctattggaattgctgaaagtcaaacgtagtgaagaaagacgtgtcggtaaagaatgtcgctcccgatggagtccttaccat

SEQ ID NO: 1361 - DNA, 792 bp, Nepeta cataria
atgtatccagtggttcccggtcatgaaattacaggtataataacaaaagtaggctctaatgtaacaggcttcaaagttggtgatagggccggtgtaggctgtctagcagcaacatgtttaaaatgtgaatgctgccaggaaggccaagaaaactattgtgatgacgtacaatttgtttataacggcattttttgggacgggtcaatcacttatggaggttactcagattttcttgtggctgaccatagatatgttgttagagtccccgagaacttacccatggatgctgcagctccattgttgtgtgctggaatcacagtttatgctccaatgaaagataacaatttgctggaaacgaaagggaagcatgttggcgtagtcggtctgggtggcttgggtcacattgcagtcaaatttgcaaaagcctttggccatcatgttactatcatttcaacaagtccgagcaaagaaaaagaagcaagagaaaaacttggagctgatgattttatcttatcgacggatgctaaacaaatgatgactaaaaaaagatccttagatttcatactggataccgtctctgccaagcattcgttgggtcctctattggagctattgaaagttaagggaaccctggttatcgtaggcgcacctgaaaaacctatggacttgccatcttttccactgatattcggtaagcgggttgtcaagggctcaatgattgggtcaatcaaagaacgatctgaagaaagaagagttggtaaggaatgtagatccagatggtccccatatcac

SEQ ID NO: 1362 - DNA, 1122 bp, Nepeta cataria
atgtcggcaatccgttgtaaggcggcagttgcgtgggcagccggcgaacctttggtcattgaggaggttgaattgagccctcctcagcccatggaaataagaataaaagtggtatgtacaagtctgtgcagatccgatcttacagcatggctgtcacaggctcaaccccagttatttccgagaatttttggccatgaagccagcggagtagtcgaatcagttggtgagggagtaaccgaattcgaagtgggcgatcacgtgttgactttgtttacaggagaatgtatgaagtgcaagccatgtgcctctggtaagtctaatacctgccatacattgggtctcgaaagacaaggtgttatgcactcggacaaaaaaactagatttagcattaagggcaaacacgtatatcattactgcgcggtttcatcattttccgaatacacggtggttcactcaggatgtgcggttaagatttccccaatcgctcctttagaaaagatttgtttgttatcttgtggcgtcgcggcgggtctgggggctgcttggaaagtggctaatattagcgagggttcaactgtagcaattttcggtcttggaacagtaggattgtctgtcgctcaaggcgctaaaagacgcggagcttctcgcatcattggtattgatacaaaccctaaaaagagtgaaaccgcaaaagcttttggcgtcacggacttcgtcaatccaaatgatcatgatcaaccaatccaacaggttataatcggaattacagatggtggtgctgactacgcctttgaatgcgttggtgatacaggtatgataaccgccgctcttcaaagttgttgcgcggggtggggcttaactgttactcttggtgtgcccaaggaagaaccaggtataactgctcattatggtttgttcttgtctggacgcactctaactggttctctctttggtgggtggaaacccaaatccgatttgcctagtctagttgacatgtatttaaaaaaggaaatcgagatcgacaagtatataactcataacttgatgtttgaagacataaacgaagcttttgaactaatgggtaagggtaaatgcttgcgctgtgtgatacacatgccgaaa

SEQ ID NO: 1363 - DNA, 1131 bp, Nepeta cataria
atgggctccttgggtagcaacaatcactccgaccatatttttatctccaatgaaacaattggcaaggtaattacttgtaaggctgcagtcgcttacgctgctggtgaacctttagtagttgaagaaattagagtagaccctcctcaaaagatggaggttcgtattagagtcctgttcacttcaatctgtcatacggatttatccgcatggaaaggtgaaaccgaagctcatcgcgtttacccgagaatctttggccacgaggcttcgggcgttgttgaatccgtaggtgagggagtctcggacatagaaattggtgatcatatcgttcctatttttaacggcgaatgtcaaaattgtgtttactgcaaatctaaaaaaaccaatctgtgccagaagtacagggtaaatccgatgaagtccactatgacaggggatggtaaatgcagattcagcaccaaagaaggcaaccccatattccatttccttaatacctccacattttccgaatatacagtactggattcagcctgtgtggttaagatcgatagaaaagcctctttagagaagatgactctattgtcttgtggagtgagcactggtttaggagctgtttggaacaccgccgatgtagaagaaggatcgaccgttgcagtctttggattgggtgccgtgggtctggcagttgtggagggagctagagcacgtggagcctcaagaattattggagttgatattaactccgataaacaaataaagggcagagccattggtttaactgattttattaatccgaaggatctagatattcctgtacatcagaaaattcgagagatggctaatggtggtgttgactactcattcgaaagtgcgggcaatttagacgtgttaagagaggcctacctatctactcacgatggctggggttttactgtcattttgggtatacatcctacacccaggatgctgccgctccacccaatggaactttttgatggtagacgcattgtagcatctgtgttcggtgattttaagggaaaatctcagctaccacactttgccaaccaatgtatcaagggggaagttaaattggacgaattcattacacacgaaatcgatagaaagagcgttgtt

SEQ ID NO: 1364 - DNA, 729 bp, Nepeta cataria
atgtctgctattcgttgcaaagctgcagttgcttgggctgctggggaaccgttggtgatcgaagaagttgaactatccccaccacaacctatggaaattagaattaaagtcgtgtgcactagcctatgtcggagtgatttgacagcctggttgtcacaagcccagccacagcttttccctagaatttttgggcatgaggccagcggagttgttgagagtgttggtgagggtgtcaccgagttcgaggttggggatcatgtattaacattgtttaccggtgagtgtatgaagtgcaagccatgcgcgtcaggaaaatcaaatacatgccatactctagggcttgaaagacaaggtgtcatgcacagtgacaaaaagacccgtttctctattaaaggtaaacacgtgtatcattattgcgctgtatcttctttcagtgagtacaccgttgtccacagcggttgcgctgttaaaattagtcctattgctcccttggagaaaatctgtctgttgtcatgtggcgtcgctgctggtttaggagccgcatggaaagtggctaacatttcagaggggtcgactgttgctatctttggcttaggtaccgtaggattatctgtcgctcaaggagccaaaagacgtggggcatctagaatcattggaattgataccaaccatagatctgaagaaagaagagtaggtaaagaatgtaggagcaggtggtccccctatcat

SEQ ID NO: 1365 - DNA, 534 bp, Nepeta cataria
atgtctgccattaggtgcaaggcggctgttgcatgggccgcgggtgaacctttagttatcgaagaggtggaactttctcctccacaacctatggagattagaattaaagtcgtttgtacatccctatgcagatcggatttgacggcctggttgtcgcaagctcaacctcaattgttcccgagaattttcggacacgaagcgtccggtgtggttgaatcggtaggtgaaggggtcactgaatttgaagtgggcgaccatgtcttgacgttgtttaccggcgaatgtatgaaatgtaagccttgtgcaagtggaaaatctaatacctgccatacactaggtcttgaacgtcaaggggtcatgcatagtgataagaaaacacggttttcgattaaaggaaagcatgtctatcattactgtgctgtttctagttttagtgaatatacggttgttcactcagggtgtgccgttaagatatctccaatagcacctttggagaagatctgtttgttgtcctgcggcgttgctgccggcaca

SEQ ID NO: 1366 - DNA, 1305 bp, Nepeta cataria
atggccttttgcagatcttcattactactacgaaaagctctaggcggttcaagaagagctgctgctgctgccacatgttcaagtgcttatgcatgcgggtggcaatcagaacgtggcaggtggtacagcggaggagaagggactactatatccgctccgggctaccacgtaaatacagcaccatcccatatgaccggtgctgtcttttgggataaggataaaccaattacttacgaagaatttgagatgccaagacctaaagctaatgaggtgttaattaaaacaaaagcctgcggggcatgccattcagatttacatgtaattaaaggtgatcttaaatttccttgtccatgtatactaggtcacgagattactggcgaagtagtcgaacatggtcctctgaccgaaactaaatatattgaaagatacccagtggggtctaaagttataggtgctttcattatgccgtgcggtagttgtttctattgtagccgtggtgaagatgatttgtgtgaaccatattttgcatataatcgtgccaaaggtacactatatgatggacaaactagattgttccttcgtgggtcaggtaagccagttcatatgtggagcatgagtggcctggctgagtattgtgttacgccagtaaatggcctgggtgcgttgcccgataccttaccttacgctgaaagttcagttcttggttgtgccgttttcaccgcatatggcgctattgcccacgctgctgaggtaaaacctgggaatagtgttgcagttattggaattggaggtgtgggttcttcctgtttacagattgccaaagctttcggtgcttctgaaataatcgctgttgatgtagaggacggtaaattagaaaccgcgaaaacttttggcgcaacacacatcataaattctagaaaagaagatgctattgctaagattaaagaactaactgatggtagaggtgttgatattgcagttgaagctataggtggtcccaaaacctttgcccaatgtgtgggctcggttagagcgggcggaaaggcagtgatgattggtttgtcccctactggaggaaaaggcgaggtcgaaataactcaattggtccgcagaaaagtgaaagtcataggttcctatgggggtagagctatgacagacttgccaaaattagttgaactggcagaacagggaacatttaatctggaggccgcagttactagaagatataaatttgaagaagtcgcacaagcttatcaggacttacaaaacaaaacaattgttggcagaggcgtgatcgaaatcatg

SEQ ID NO: 1367 - DNA, 666 bp, Nepeta cataria
atggttgtgcaccaccattttattgtccgtataccagataacatgcctttggacgcagccgcgccgctcttatgtgcgggtattacgacttactcgcctctcagatactttggtttggataaacctggtcttcacataggagttgtcggcctcggtggcttgggccatttggctgttaaatttgcgaaagctttcggcgctaaggttacagtcatctctacatctcctaataagaaagaccaagctttgtctcatctaggtgcggactcatttttaatctcaaaaaatgcttgcgaaatgaaaggcgccatgggtacaatggatggaatattagatacggtctcagccgtccaccccgttatggagttggtaggtctactaaaagcacagggtaaattgataatgttgggcgctccggaaaaacctttggaacttacggcctttccactaattgcaggcagaaaaatgatcgctggttctggtattggtggaatgaaagaaacacaagaaatgattgattttgccgcaaaacacaacattaaggctgatattgaacttataccaatggactacgttaatactgcgatggatcgtttggcaaaagctgatgttaagtatcgctttgttattgacgttgccaacactatcaaaaattctttgttatta

SEQ ID NO: 1368 - DNA, 1137 bp, Nepeta cataria
atggcccaagccacgccaaaccacactcaaaccgtttcaggctgggctgctcacgatacaagtggaaaaattactccatacacctttaagcgaagagaaaatggagaagatgatgttaccataaagatattgtattgtggcatctgtcacactgacttgcattttgcaaaaaacgaatggggaattactatgtacccagttgttcccggtcacgaaataaccggcattatcactaaggtaggaagcaacgttactggtttcaaagttggtgacagagcaggggtaggctgcctggcagctacttgtttgaaatgcgaatgttgccaagaaggtcaagaaaattattgtgatgatgtgcaattcgtgtataatggaatattctgggacggcagcataacttatggtggttactcggacttcctggttgctgatcatagatacgtagtgagagttccagaaaatctacccatggatgctgcagctccgcttttatgtgcaggtataaccgtttacgcccctatgaaggataataatttgttggagaccaaaggtaagcacgtaggcgtcgtaggtcttggaggtctaggtcacattgctgtcaaattcgcgaaagcgttcgggcatcacgttacaataatcagtacttctccaagcaaggagaaggaagccagagaaaaattgggtgccgatgatttcatcttgagcaccgatgcaaagcaaatgatgactaagaaacgatctctagatttcatactagataccgtttccgcaaagcattctttagggccactattggagttgcttaaggttaagggaacactcgtcatagtgggcgcacctgaaaagcctatggatttaccgagtttccctttaatttttgggaagagagtagttaaaggttccatgattgggagtatcaaggagactcaggatatgatggatgtttgcggtaaacataatatcacatgtgacatcgaggtcgttaatacagacaatataaacgaagcattggatagacttgctaaaaatgatgtcaaatatagattcgtaatagatattacagcgaagagtacccctaagcggagcgaagaaagaagggtgggtaaagaatgccgctctaggtggtcgccataccat

SEQ ID NO: 1369 - DNA, 1083 bp, Nepeta cataria
atggctcaagcaactcccaatcatacacagactgtttcaggttgggctgcgcacgacacctcgggaaagattactccatacacattcaagagaagagagaatggtgaagacgatgtaaccataaagatattgtattgtggaatttgtcacacagacttgcattttgccaaaaacgaatggggcattactatgtatcccgtagtgccaggccatgaaattactggtatcatcacaaaggtaggttcaaacgtaacgggctttaaagttggcgatagggccggtgttggatgcttagcagccacatgtttaaagtgtgaatgttgccaagaaggacaagaaaattattgtgatgatgtacaattcgtgtataatggtatcttttgggacgggagtattacttacggtggttattcggattttctagtggcagatcataggtacgtcgtcagagtacccgaaaacctgccaatggatgctgctgctccactcttatgcgctggtataacagtatatgccccaatgaaggataacaatttgttggaaactaagggcaaacacgttggagtagttggtctaggtggactgggacacattgcagtaaagttcgctaaggcattcggacaccatgttactatcattagtacttcaccctccaaagaaaaggaagctagggaaaaactcggtgctgatgactttatcctgagcaccgacgcaaaacaaatgatgacaaaaaagagatcgttggattttatcctagatacagtaagcgcaaaacattctctgggtcccttgctggaactactcaaagtgaagggaacgttggtgatagttggcgctcctgaaaagcctatggatctaccttcttttcctttaatttttggtaagcgggtagtcaaaggatccatgatcggttccatcaaagaaactcaagacatgatggacgtgtgtggtaaacataacattacatgcgacatagaagtggtaaatacggataatataaatgaggctttgcatagacttgccaaaaatgacgttaaatatagatttgtgattgacattgctgctaaatcgtcccctaacatt

SEQ ID NO: 1370 - DNA, 894 bp, Nepeta cataria
atgtatccagttgttcccggccatgaaatcacgggtatcattacaaaagttggttctaatgtaacgggtttcaaagttggagatagggcaggtgtcggatgccttgctgctacttgtttaaagtgtgaatgttgtcaagagggtcaggaaaattattgcgatgatgttcaatttgtttataacggcatattctgggatgggtctataacttatggcggttattctgactttctggttgctgatcacagatacgtagtgcgcgttcctgaaaatttaccgatggacgctgcggcacccctattatgcgccggtataaccgtttatgcccctatgaaagacaataatcttttagaaacaaaaggtaaacatgtgggcgttgttggcctaggtggtctgggtcacattgcggttaaatttgcaaaggcatttggccaccatgttacgattatatctactagcccctctaaagaaaaagaagctagagaaaaactaggtgcagacgattttattctgagtacagatgctaagcaaatgatgacaaaaaagaggtctttagacttcatattagacactgtatctgccaaacattctttgggccctttgcttgagttactcaaagtgaaaggcaccttagtaattgtgggggccccagaaaaaccaatggatttgccaagtttcccgctaattttcgggaaacgagtggtaaagggttcaatgatcgggtccattaaagaaacccaggacatgatggatgtctgtggtaaacataacattacgtgtgatatagaagtggtaaatacagacaacattaatgaggctctagatagattagcaaaaaatgacgttaaatatcgttttgtcattgatattactgctaaaagtactccgaaaata

SEQ ID NO: 1371 - DNA, 702 bp, Nepeta cataria
atggcgcaggcgactccaaatcatactcaaactgtgtcaggttgggccgcacacgatacatccggcaagattactccttacacgtttaaacggcgtgaaaatggtgaagacgatgtgactataaaaattttgtattgtggtatttgtcatacggacctacattttgctaagaacgagtggggtattacgatgtatccggtcgtccccggccatgaaatcacaggaataattacgaaagtaggttctaatgtgacaggcttcaaagtcggggatagagctggtgtcggctgtttagctgcaacctgtttaaaatgtgagtgttgtcaggaagggcaggaaaattactgcgacgacgtccaattcgtgtacaacggtattttctgggatggctcaataacttacgggggttatagcgactttttagtggctgatcatcgatatgttgttagggtaccagagaatctacccatggatgctgctgctccattattgtgtgctggaatcactgtatacgctcccatgaaggacaataatttattggaaacaaaaggtaaacatgtcggtgtcgtcggtcttggtggcctgggtcacatagcagtaaaattcgctaaggctttcggccatcacgtaactattatttcaacttcaccatcgaaggaaaaagaggcaagagaaaagcttggtgatagaaagtctgttgtg

SEQ ID NO: 1372 - DNA, 942 bp, Nepeta cataria
atgtactgtggcgtttgttatgcagatgtgatctggaccagaaacgtaatgggtcattctaactacccacttgtgccaggtcatgagattgtaggtattgttaaggaagtcggttccaatgttgacaggtttaaagtaggtgaacatattggggtgggtacctacgttaacagttgtagggaatgtgaatattgtgacaaccagatagaagtgcactgttcgaaaggctcaatcttgacattcgatggcgttgactttgatggcactattaccaaaggtggctactcatcctatattgttgtacatcaaaggtactgctttgttattccagagaattatccaccccagctcgctgctccattactatgtgccggtatcacggtatatactccgatgatgcgtaacaatatgaatcaaccgggtaaatctttgggggtcattggattgggtggcttgggtcatctggcagttaagtttggtaaagcttttggtttgaaagtcactgtcttctctacatccatttctaaaaaacatgaagcattgaatttgcttggtgccgataattttgtactctccagtgacgagaaagaaatgaaagccttaaaaggttcaattgatttcatcattaacacagcatcaggtgatatctcattcgacctatatctttctttacttaagaccatgggtgtatttgttctagtaggatttccgtcggaggttaaatttttacctggctcgcttaacttgggcagtaagactgtgactggaagtatcaccgggggtacaaaacagactcaggaaatgttggcgttctgtgctagtcataagatttacccagagattgaactaatcccaatacattattgtaacgaagccttggaaagacttgtcaagaaggacgtcaaatataggtttgttatcgacattgccaactcattagcc

SEQ ID NO: 1373 - DNA, 981 bp, Nepeta cataria
atggcacaagctactccaaatcacacacaaaccgtgtcgggttgggcagcacatgatacctctggtaagattacaccctacacattcaaacggcgtgaaaacggtgaagacgatgttaccatcaagattttatactgcggtatctgtcacactgatctccatttcgccaaaaacgaatgggggattactatgtatcctgttgttccaggtcatgaaataacaggtataatcaccaaagttggtagtaacgtgacaggatttaaagtcggtgatagagcaggtgtcggttgccttgctgctacttgcttgaagtgtgagtgctgtcaagaaggtcaagaaaattattgcgacgatgttcaattcgtttacaatggaattttctgggacgggtcgataacatatggggggtatagtgattttttagttgcagatcataggtacgtcgttcgtgtgcctgaaaaccttcctatggatgccgcggctcctctgctatgtgcgggaatcacagtgtacgcacctatgaaggacaataacttactggagacgaaaggtaagcacgttggagttgtaggattgggtggattaggtcatatagcggttaagttcgctaaagccttcggacatcacgtgactatcatatctacatcaccgtctaaagaaaaggaagccagggaaaagttaggtgcagatgattttattctttcaaccgatgctaaacaaatgatgacaaagaagagatcacttgatttcatcttggacactgtttcagcaaaacactccctcggtccactattagaattgcttaaagtgaagggcaccctcgtcattgttggggcaccggagaaacccatggatcttccttcctttccgctaatatttggcaagagagtggtgaaaggtagtatgataggtagtattaaagaacggtctgaagaaagaagagtcggtaaagaatgtcgatcaagatggagcccgtaccat

SEQ ID NO: 1374 - DNA, 1137 bp, Nepeta cataria
atggcaactcacggtcaagttatcacatgcaaagctgctgtagcttgggagcctaacaaacctcttgttatcgaagaggtccaagttgctccaccacaggcaggagaggttaggatccaaatcttatttacagcattatgtcacaccgatgcatatacatggtctggtaaggaccccgaaggattattcccatgcatccttggtcatgaagctgcgggcattgtcgaatccgtgggggagggtgtaactgaggtgcaattaggggatcatgttataccctgctatcaagccgaatgttctgaatgtaagttctgtaaatctggaaaaactaatctttgtggaaaagtgcgtgtcgcaactggagtgggggttatgatgactgatagaaaatcacgtttctcagttaatggtaaaccaatctatcattttatgggtacatcaactttttcacaatacaccgttgttcatgatgttagcgttgcaaaaattgatcctgttgcacctttggaaaaggtttgcttacttgggtgcggtgttcctacaggtctgggtgctgtttggaacactgctaaagttgagcctggaagtatcgtcgcgattttcggattaggaacagtaggacttgcggtggcagaaggtgcaaaggctgcaggtgctagcagagttattggtatcgacattgatgctaaaaaatttgacagagctaaggatttcggtgttacagaatgcataaaccctaaagatcatgaaaaaccaatacaacaggttattgttgatctaactgacggtggtgttgattactcttttgaatgtataggtaacgtcagcgttatgagatccgctctcgaatgctgtcataaaggatggggcacctccgttatcgttggtgtagctgcctcgggtcaggaaatttcaacgagaccatttcagttagtcaccggtagagtatggaaaggcaccgctttcgggggctttaaaagtcgttcccaagtaccatggttagttgacaaatatttgaagaaagaaattaaggtcgatgaatacattactcataattctactcttgccgaaatcaacaaggcgtttgatatgatgcacgagggaatgtgtttgagagtcgtattagacatgaacatg

SEQ ID NO: 1375 - DNA, 702 bp, Nepeta cataria
atgtattccatggggggcttggctgaattctgcgttgtgccagcacatggtttaactagtttaccaaacaccttaccgtataccgaatcggccgtgttaggatgtgctgttttcaccgcatacggtgcgatggcacacgcagcacaagttagacctggagattcggttgctgttattggcatagggggtgttggcagttcttgcctacaaatcgccaaggcctttggtgccagtgaaatcatagcagtagacgtgcaagacgaaaagttggaaaaggctaaaatactaggggctacacacgcaattaattctaggaaagaagatgctgtagcaaaaattaaagagattactggaggtaggggtgtagatgtcgcagtcgaagcattgggtagacctcaaacattttcccagtgcgtccaatgtgttcaagacgggggtaaagcggtgatgataggtttaaccttgagtggggcaaaaggcgaggtggatattaaccatttggtcaggcgtcaaatcaaagtcatcggttcgtatggtggcagggctagacaggatttaccaaagttagttaaactggctgagaaagggacattcaatctccaggcagctgtttcaagaaagtataaattcgaagaagttgaagaagcatacaagaatcttgatcaaggatccattgtgggtaggggagtcgtcgaaattatg

SEQ ID NO: 1376 - DNA, 513 bp, Nepeta cataria; identical to SEQ ID NO: 1357

SEQ ID NO: 1377 - DNA, 624 bp, Nepeta cataria
atggctaagttccaacagaaagctttcggacttgcagcgaaagattcatctggtgttttgtcgccattccatttttcacgccgagataatggtgctaatgacgttactatcaaaactttgtattgcgggatttgtcactcggatttgcacacagttaaaaacgaatggggtttcacgcaatatccggtggtgccagggcacgaaatttctggcttggtgacaaaagttggcaataatgttgagaaatttaaagtaggcgatagggttggggtcggcgtgattgtcggatcctgtaggacctgtgatctgtgtcaacaagatctagaaagttactgtccaaagatgatctttacatataacgcaacggataaggatgggaccagaacctatggtggatattctgatattatcgtagttgatcaacattttgttataagattcccagataatgtcccgtctgacgcaggcgcgccgttattgtgtgccggtattacagtctactctcctatgaaatactacggaatgacagaagcaggtaaacacctcggtgttgcaggactaggaggattaggtcatgtcgctgtcaaattcggtaaagcgtttggcgataggaaatccgtagta

SEQ ID NO: 1378 - DNA, 1065 bp, Nepeta cataria
atggctaaattccagcaaaaagcttttggacttgccgctaaagattcctcaggtgtattgtcccccttccatttctctcgtcgtgataacggtgcaaacgatgtcacgataaagacgttatattgtggcatctgccatagcgatttgcacacagtaaaaaatgaatggggctttacgcagtatcctgtagttccaggtcatgaaataagcggattagtcactaaggttggtaacaatgtagaaaaatttaaagtaggagatcgagttggtgttggtgtcatcgtcggtagttgtaggacatgtgatctatgccagcaagatttagaatcgtactgcccaaaaatgatctttacctacaatgcaacagataaagatggtaccagaacctatggtggttacagcgacataatcgttgttgaccaacatttcgtcatcagatttccagataacgttccttcggacgctggtgcaccacttttgtgtgcaggtattacagtttactctcctatgaaatactacggaatgaccgaagccggtaagcatttgggagttgctggtttaggagggctaggtcatgtcgccgtcaaattcggtaaagcgtttggtatgaaagtgactgtgattagtacttctcctaaaaagaaaattgaagccattaataaattgggtgcagacgcattcgtcgttagtaccgatgctgaacagttaaaagcagccactggaacaatggatttcatcatcgacactatagcggctgttcatcagctgacgccattgttatcactattgaagatgaatggaaagttaattacggtggggttgcctaacaaaccattggatcttcccatcttcccattggtagccgggcgaaaattgattggtgggtctgatttcggaggtgtgaaggaaacacaagaaatgttggatttctgtggcaaacatggtataaccgctgatattgaattaataggcattgaggacgtcaatacagcaatggaacgtttagcaaaatcggatgttagatacaggttcgtgattgacgttggcaaaagtattgccaatctt

SEQ ID NO: 1379 - DNA, 957 bp, Unknown
  Nepeta cataria or Nepeta mussinii
atgtctagggagggagaaggaaaggtagtatgcgttacgggcgcttcagggtatgttgcttcttggctagttaagctgttactacagagaggctatactgtcagagctaccgttcgtaatctgagtgatccattgaaaactgaacatttaaaggccctagatggagcagccgagagattggaattattcgaagcagatctagttaaagagggttccttcgattctgttttccatggttgtgatggtgtctttcacaccgcttctcctgtaatctttaggaccactaatccacaggcagatcttatagaacccgccgtcaaaggtacagtgaatgttttaaggagttgcaccaaggcttcgtcagtccgccgggtggttctcacatcttccacagcagctgttgttgtgaatggccgtccttttggcccagatgtcgttgtcgacgaaacctggttctctgacccgcatttctgcgagaaaaataaagactggtattgtttatctaagactttagctgaggaggcagcttggaaatttgctaaggagaatggaatcgatctagtcgtaatgaacccagggcttgttttgggccccttgttgcaaccaaccttgaacattacgagtcaggtttttttggacattattaaaggtaaaccgatagcaccatactaccaatgcgttgacgttagagatctgggcgacgcccatattttgggtttcgaaaaatcctccgcctcgggaaggtacatactagtcggtaaaactatcacccatttgcagttcatgcaattgttgcataacttgtatccatccatcgttgacgctccaaccagtgtcgctgataatccaattggagaagtatccaagaaaaaggcagaatcattgggtatgtctttcatgccactggaagtgacagtcaaagattcagtggaatctttaaaagaaaagaacttctta

SEQ ID NO: 1380 - DNA, 972 bp, Unknown
  Nepeta cataria or Nepeta mussinii
atgaaaagagtctgcgtaactggtggaaccggcttcatagcttcatggttgataaaacgcttgttacatacgggttactcagttaacacaactgtacgaaagaatgctgatggtaaacgtgacctccgttacctaacaaatttacccggggctagtgaaaatcttaatatatttgatgcagacttggatcaacccgattccttcacgccagcgatcgaagggtgtgttggcgtgtttcatatagtccacccaatggaatgggacgaaaccgaatcagaagagacaaaaaccaagcgagttattggtggtcttttagccatccttaaagcatgcttagattcacctactgtgcgtaggtttatgcatacatcgtcttcctctgcagttgtttttgacggcaaagatcttgacactagagatgagacttcctggtcacatttggatcttatgagaaatatgggtctacagggaaactcgtatactatcacgaagacattggccgaaagaacggcattggagtttggaaaacaacatggattagatgttatttctctagttccttcgtgggtgcacggcccattctttacccctaggtgcccaaactcggtgctcgtgttcttagccctgatacttggtgatgaaaactattataagttcttgatgaaagcttctgttgtccatgtcgatgatgtggctcgcgcgtttgtgcacttatttgaatgccctgaggctgaaggccgttatatttgcagcgcattggaagtgacaatcgaagaattaagcgaatttttatctcaacgttacccacaatttcatatccctaccgccgactcgttcaaaggcatagagccggtgaagctttgtggtctatcgtctaagaaattgttagaaactggattcaagtatgaatatggtctggaggaaatgttcgatggtgcaattcatagttgcaaggaaaaaggcatattgtat

SEQ ID NO: 1381 - DNA, 999 bp, Unknown
  Nepeta cataria or Nepeta mussinii
atgggcgaagaaactaacatgaaaggcaaagtgtgtgtaaccggcggcactggttttttggggtcatggatggttaagcgtctgttacaacatggttacagtgttaacacaactactcgcattcaagctggagaaaagaaaaggaacatcgattacttacgtaatttagcgggcgcttctgaaagattgcatattttcgatgctgacctcgatagaccggaatcattctctgcagccattgaagggtgcgtcggtgtcttccatgtggcacatccattggactttgaagaaagagaaactgaagaggtaaaaattaaaagggtcgttaatggcaccgtcggcatattgcaggcctgtgtggatgcgaaaacagtcaagcgagtggtttactgctcctcggtagccacggcggtctttaatgacaaggccgctactttggacaaaatagatgaatcctcctggacggacgttgaattcttgcgtagtctaggagtctttggaggtgcatactcagtaacaaaaacgttagtcgagcaaaccgttttggagtttggtgaaagaaatgggttggacgttgttgccatacttccgtcatggatacatggcccctttatctccccttattgtccagattccgtgtctatatgcatggctttaatacaaggggacaagaaatcgtatcaacgcttagttagaacaagtctagttcatgttgatgatgtagtaagagcccatattcatctgtttgaataccctcaagccaagggtcgctacatctgttctaacgtggacataacaattgacaagttgcatgaatttctcaaagctaattatcctgaatataagcttccatccaccgaggaatttgaagacttaattccggtggctttccctgaactttcatccaaaaagttattagagactggatttaagttcgagaatggcttgcaggaaatgttcgacggggctattaagtcttgtaaaaaaatgggtctcctc

SEQ ID NO: 1382 - DNA, 957 bp, Unknown
  Nepeta cataria or Nepeta mussinii
atggccgaaaaaggtaaatgcgtctgtgttacaggtgcagggggttacgtcgcatcttggctgataaatttattgctttcccaaggctatacagttcatgctaccctaagaaatcccggagacgaaaaaaatggtcatttacataaattggaaaatgctccacaaaacttgaagttattcaaggcagatttgttagactttgactccatcttggctgcagtaaaagggtgtgatggcttgttccacgtggcttcgcccgcgcctcctgctagcgttccgaatccacaggttgaaatcgttgagcctgccgtaaagggtacattaaacgttcttaaagcttgtttcgaggcgagtgtgtgtagggtagtcatcgtttcttcgggtgttgccgtcttcatgaacccaaactggcctaaggataaagtcttagatgagagctgttggtcggatgctgaattttgtgctcgtacaaacaattggtattgttacagcaaaactgccgccgaagctgaagcatggtcttatgcagaaacgaacggcttagtattagtttctgtttgtccaactttggtcttggggcctatgttgcaacagacgcctaatagtagttctttaattctattaaaattgctcaaagaaggatatgaagttacagaagatcacgacagagtaattgtggatgtcagggatgtcgctgaggccatgaagctagtttacgaaaatagagaagcaaaaggacgctatatttgtacatcccatactattaaaactcgagacttagttcaaatgttaaagcaaatttacccaaattaccattaccctaaatccttcaaagagggtaaggaattgccacagcttagctctgggaagttagaaggtcttggttggaaatacaaaccgctagatgaaacattagttgatagcgtcgagaattataaacagataggtttgctgatg

SEQ ID NO: 1383 - DNA, 987 bp, Unknown
  Nepeta cataria or Nepeta mussinii
atggagaaatccgtgaaagtttgtgttaccggtggtgccggatacatcgcctcctttttgattaaacacctactattgaggggatacacagtacacgccacgttgagagatttgggtgatgactccaaggttggtttactaaaaagattagaccacgccgaaacacgactgaagttattcgccggagacatgtacaatccaactgaattcgcagatgcgatttacggttgtgaatttgtttttcatattgcaacaccaatgcagcatactgaaggtagtcaatataaaaatacatgtgaagccgctgtggccggtgccaaaatgatagctgagtcctgtattaaatctaggactgtgaaaaaattgatctataccgcaagtgtaacagctgcctctccattgaagggggacgctagtggatatgaggatgtcatggatgaaacatgctggactcctctaaaccattcctttcaattacattatgattatgttaacagcaagacattagcagaaaaagaagtcctatcctacaatggtgccgggatgggcgtagtttctttagcctgtggtcttgtaggcggggagactatacaaagtttcgcctccggtagcatggctgtcctcatctcacaagccacaaacgatggaacgttatataaagctctgagggaactggaagacctagatagtaaggtacctatagtacacttacaagatgtcatggaggcgcatatgtttgctatggaaaactcggatatgaatggtagatttctggttgcctcggattttcttaagagtgcccaaatagcttcgcttatacaaaaacattacccccatataaacatctcctcacaattgattgaagataccaagagggaaacaaagtggggctctagaaagttacaagatttaggatttgaatataagtgtgatgcagataagattatttacggttcaattgtgtgtgctaaaaaattcggccttata

SEQ ID NO: 1384 - DNA, 960 bp, Unknown
  Nepeta cataria or Nepeta mussinii
atggcagaaaaggacaagacagtatgtgtaacgggtgctggcggattcgttgcaagctggttagttaagttgctgctttctcaaggttatactgttcatgggacggttaggaacccgggagatgagaagaatgcccacttaaagagattagacaacgctgcagaaaatttgaaacttttcaaggcggacttgctagacttcggctcaatcatcgaggccgtcaaaggttgtgtcggggtgttccacgtagcgtgtcctgttccaggctcatccgtcccaaatccagaagttgaactggtacaaccagcccttaacgggacattaaatgtactgaaagcttgctctgaagtaaaagttggtagggtcgtagttgtatcatcggttgctgcagtatctatgattagagattggccaaaagaccaagttatggatgagaattgttggtcagataaggaatattgcaaggagaccaataactggtactgttattctaagactgttgctgaggctgaagcttgggaatattccaagaagaacggtttaaacatcgttacagtttgccctaccctagtcttgggtcctatgttgcaacatatggctaacgcgtcttctacttcattgattactatgttaaaagaaagtatctctgatatcgaaaacaatctacgcaagatagtagatgttcgcgacgttgcggaggctttaaaactggtatatgaaaaacccgaggcagaaggtaggtatatttgtatggcacatatgatcaaaaacgcagatctgatggatatgttgaagatattttacccaaattacgactacccaaatgacgttaaagaaggtaaggatgagaagaaagtcagttctgaaaaattacaaaaactagggtggaagtttaggccacttaaggaaaccgtcgtagattcggttgaatcttacaagcagcttgggtttttgtggtca

SEQ ID NO: 1385 - DNA, 987 bp, Unknown
  Nepeta cataria or Nepeta mussinii
atgagcatcgcagccgctaaaacagtatgcgtcacaggggcatcaggctatatagctagttggatagttaaatttctcttgcaaaagggttatactgttaaggcgagtgtgagagatccaaatgaccaaaaaaaaacacagcaccttctggcattagacggggcaaaggaaaggttacacttgatgaaggcaaaccttttggaggaagggtcctttgactcagtcgttgatggttgtgacggtgtttttcatactgcatctccattctatcatgcggttactgaccctcaggttgaactaattgaacctgcggtgaagggtactctgaatgtgttgggcagttgtgcaaaagtgccctctgttaagcgtatcgtactaacatcatctatagctgctgttgcttataatgggaaacctaggactccggaagtagtggtagatgaaacatggtggtcggccccagatgtttgtgagcagatgcaaatgtggtacgtcttaagtaaaacattagctgaggacgccgcatggaaatttgttaaggagaagggtatcgaaatggtgacaatcaaccccgctatggttataggtccactacttcaaccaacattaaacactagtagtgccgcgattttaaacctaatcaatggtgctgaaacttaccctaatagcacgttcgggtggattaacgtgaaggacgtagcaagagctcacattttggcatttgagaacacttccgcttccggaagatattgtcttgtggaatcggtagttcacacgtctgaggtagtgaaaatcttgcatgaactctatccaacttacaaattacctgataaatgcgctgacgataagccattcgttcctacgtatcaagtttctaaggaaaaggctaaatctttgggtattgaatttacgccattaaaagaaggaataaaagaaactgtggagtcattaaaagaaaaagatatgttcaaaccatctgccgctgtc

SEQ ID NO: 1386 - DNA, 930 bp, Unknown
  Nepeta cataria or Nepeta mussinii
atggctgaaaagtcgaaaatactgatcataggtggtactggatatatcggtaaatttattgttgaggcttcagctaaatctggtcacccaacttttgctttggttagagaatctgcagttagtgaccccgctaagagtccattaattcagggttttaaggatagtggtgtgactatcctaataggcgatctaaaggatcatgaatccttgttgaaagctataaaacaggtagacgtggtaatatctactgtaggacagatgcaactggatgatcaggtgaatatcatagcagctattaaagaagcaggcaacatcaagagatttttcccatctgagttcggtaatgatgttgatcgtactagagccgtagaaccggccaaaagtgcattcgctgctaaggcaaaaattagaagagcaattgaagcacaaggtattccatacacttacgtgtcttcaaattactttgctggttactctttacccactttggctcagcccggcgcctttgctccaccacctcctagagataaagtcgttatttatggtgacggcaatgcgaaggcagtcttcaacggggaacatgatataggcacatatacaataaaagctgtggatgatccgaggaccttaaataagattgtttatataaaacctcccaaaaatacttattcctttaatgaactagttgcattgtgggagaagaagattaacaagacgttagagaaagagtttattcccgaggaacaattgctaaagcaaattcaagagagccccatccctgtgaatattatactcagtataaatcatagtatctttgttaagggtgatcagacttatttcacaattgaaccttcgtttggtgtagaggcaagtgagctatacccagatgtcaaatacactaccgtagaagaatttttggatcaattcgtt

SEQ ID NO: 1387 - DNA, 1032 bp, Unknown
  Nepeta cataria or Nepeta mussinii
atggcagaagaagtcagtaacaaacaaataatttttaacgattacatcacgggttttcctaaggaatcagacatgatgttaaaaactagtaccataaaacttgaagtgccagaaggctgcgatgatgttgtgctcgttaaaaatttgtatctttcatgtgatccctacatgagaagtcgtatgtccaagctcgacgataactatgtccctattttcacaccaggttcaccaataatgggttatggagtagcaaaggttgtcgactcatgttcgccaaactttaaaaagggagatttaatttggggcatgattggttgggaagagtattcattaatcaaaagtactgatgggctattcaaaattgaacatgaggatgtcccattatcatactatacaggtattctaggtatgcctggtataagtgcttatgttggtttttatgaaatctgttgtccaagggaaggagaaaatgtttttgtatctgccgcctccggagctgtaggtcaactggttggtcaatttgccaaactgctaggttgttatgtggttggttcagcaggtacccaagataaagttgatttgttgaaaaacaaattcggttttgacgaagcttttaattacaaggaagaagttgatttaaatgctgccttgaaaaggcattttcctgagggtatcgatgtatattttgaaaacgtaggtggtaagatgttggaagctgtcctattgaacatgaacatgaaaggtagaattgcagcgtgtggtatgataagtgactataatttaaaagaggctcaaggagttaagaatttgttttccatagttgctaagcagattcgtatgcaaggatttctggtttttcactattattccttgtatcccaaatttctcgatttcatcttgcctctaataaagcaggggaagataacttacgttgaggacgttgcggaaggactagaaagcgctcctcctgccttggtcggtttgtttagtgggcataacgtaggtaaacagttagttcgtgttgttagccag

SEQ ID NO: 1388 - DNA, 948 bp, Unknown
  Nepeta cataria or Nepeta mussinii
atggagaagaatgaaagaaaaagcaaaatattaatcttcggtggctcaggttacatcgggtcgtgcatggtaaaagggagtttaaagttgggacactctacttatgttttcagccgtccgaactcctcaaagaagcatttactcaacgagttccaaagtttaggtgctattattgtcaaaggtaaattagatgaacataacaagttggtaagcgttatgaaagaagtagacgttgtcatctctgctttggcgtatccacaagtccttgatcaatttaagatcttggaagctattaaagaggcagggaatattaaacgtttcttaccctctgactttggtgttgaagaagacaagatatccgttttgcccccttttgaggaatttctggataaaaagcgaaaaataagaagagcaatagaagagagtaaaattccgtacaccttcgtctcagctgacgtttttggggcttattttataaattatctgttacatccttatgatccaaacaatcatgaaataaccgtctacggttctggcagagccaaatttgtcatgaattacgaagaagatatcggaatctacaccataaaggtagctaccgacccaagggcatgtaatagaactgttatttataggccatcaaccaatacgttgacacaactggaattgatcagcaagtgggaaaataaaattggtaaaaagttcaaaaaaattcattttcccgaagaagaagttgtggcactgtctcaaaaattaccaaacccagacaatatacccgtggccattttacattccatattcgtcaaaggtgttacaacatgttacgaatttgctgaagatgacgttgaagccagctctttatatcctgatatgaaatttaccactattgatgaactactcgacatatttttgcataatcctccaaaaccagcttccgcagcattcgag

SEQ ID NO: 1389 - DNA, 1026 bp, Unknown
  Nepeta cataria or Nepeta mussinii
atggccaaggtagtcctagtcacaggcgcttcagggtacctgggcggtaggctttgccacgcactgcttaaccaaggttattcggtcaaggctttcgttcgtgaaacaagcgcgttatcctatctacccccgccaagggatggcggcgacggtggtggatctttacaattggtttacggagacgttacagattatcctagcttattagaagcctttacgggatgtcacctagtttttcatactgcagccctggtggaaccgtggataccagacccagcaagatttatttcggtgaatgtaggtggcctgcgtaatgttctcaaagcctataaagaaacagaaaccatcgagaaaataatatatacatcatcttttttcgctctgggctctacagacggatacatagctgacgaaacccaagtccatccggctaaacatttctgtacagaatacgagaaatccaagacaatatctgataagattgctttggacgcagctgctgagggcgtacctattgtaccggtctaccctggtgtgatttacggccctggtaaggttacgacgggtaattcagttgcacacttgcttgtggaaagattttctggtagaatgcccggttacgtaggtaaggagcaaggtttctcgttttgccacgttgatgatgtagttcagggccaccttgccgctatggctaaaggtaagaaaggagagaggtatttattgactggcgaaaatgctagttttaaagatgtttttgacatcgctgctgatataacacaaacaagcaagcctcaattccaaatcccacttttcttagtggatgtgtatggctgggtttgcatattgatatcaaggatgacaggtaagcttcccctaatctctcctcctgttgttgacgtactaagacaccagtgggcatactcctgcgagaaagccaaaaaggagttagattacaatcctagatcgctgagggagggtctgctagaaatgttgccttggttgaaaagtttggggttaattaagtat

SEQ ID NO: 1390 - DNA, 972 bp, Unknown
  Nepeta cataria or Nepeta mussinii
atgggcaagatcgtatgtgtgaccggcgccagtggctatatagcatcttggttagttaagcttttattacacagaggatacacggttaaggccaccgttcgtaacctgtcagacagatctaaagttgcccacttaacttctttagaaggtgctaacgatagacttcacttatatgaggccaatttactggaagaaggatccttcgacacagcagttgacggttgtgaaggcgtttttcacaccgcatcgccagtgtccttgtctgtatctgatccacaagccgaactcattgatccagctgttaaaggtactatgaatgtcttaaaatcttgtaagaaggtatcaacaattaaaagggtagttgtcacatcgagtatagcctctgtcctgtataactatgattctctgaacctcaaacatgacactattgtcgacgagacttggttcagtgatcctattttttgcgaagaaaataaagaatggtacgccttgtctaagactttagccgaaaaagctgcctggaaatttgcagaagaaaatggtcttgatctagtaactctgcacccaggttatacaatagggccttctcttcaacctactctcaacatgacttatgtagccctgttaaatttgatcaaagagggtaagcaattgctagcaaacggtgtctaccgatatgtagacgtaagagacgtcgctttagcacacatcattgcactggagaatccaagtgctcgtggaagatattgtttagttggaagagtagcttattccttcgaggctctggatatcctgcgtatgatgtttccgaccttaaaattaccacctattgaaacaaaagatagaccaagcaaacccccttatcacgtttccaaggagagagccgagagtcttggtgtttcattccgcccattagaagagtctcttaaagacagtgttgaaagtttcagagaccgtaatctgattacccta

SEQ ID NO: 1391 - DNA, 837 bp, Unknown
  Nepeta cataria or Nepeta mussinii
atgtctactaagatggcggaagcattagagccttggagtgatttagaaggtaaaacggttatggttactggcgcgtcgtcaggtttaggccacgaattctgcttggatctggccagagctggctgtcgtattgttgctgccgctagaagaacagatagactcaaatcattgtgcgacgaaattaaccgtatgagaggcggcggatcttgcagggccatggcagtggaattagatgtgacagcgggcggtccaaccatcgctgcatctgttgatagagcgtgggccgcattcggttccatagatactttgataaataatgccggtgtaagaggtgaagttagatcttcactggaattatctgaagaagagtggaactccgtggtaaaaactaatctcaatgggtcatggttagtgtctaagtatgttggcgaaaaaatgcgtagagggggtggcggtgggtccatcataaacatttcctctatcagcgggttgaacagagctcaattgcgtggggggattgcctattcgtcttcaaaagctgggctagatagtatgacaaagataatggcgttagagctgggggatcacaatattagagtgaattcgatcgcccctggtttatttagatccgctatcactgaagatttagttaaaaaagattggttaaaaaatgttgcagagagaagcgtccctttgcgcacgttcggtacttctgatccggcccttacatcattaattagatatttgatacaccatagctcctcatacgtgtccggtaacatattcattgttgatgctggttacactctcccaggctatccaattttttcgagtcta

SEQ ID NO: 1392 - DNA, 1032 bp, Unknown
  Nepeta cataria or Nepeta mussinii
atggaagaaaatttggtcggcaacaaacagattattttcaagggttacatagagagggtgccaaaagaatccgacatggaattaaagttaggcaacaaaattaagctggaggctccagaaggttctggcgcgttcctggtcaagaacttgtatttgagttgcgacccatatatgcgtggtaggatgagggatttccatggtagttacattcctccttttcttccggggtcagtcgtcgaaggttttggagtgagcaaagtaattgatagtgataatccaaatttcaaaccaggtgatatagtttccggatttacgggatgggaagaatacagtttgttacataatactgaacaattacggagggtcgaaccagacaatattccattgtcctatcacatcggtttattggggatgccgggttttacagcatacgctggtttctataaagtgtgcgatcccaaaagaaatgaacacgtattcgttagcgccgcatctggcgctgttggtcaattggtcggtcaattagctaaactacacggctgctatgtggttggatcagctggttccgaccagaaagtagatttactaaagaaaaagctgggctttgatgaagccttcaactacaagcaggaacccgatttagatgcggcacttaaaaaatatttccccgaaggtatcgacatttacttcgaaaatgttggcggtgccatgttagaagcagtgctcttaaatatgagagttcacggtcgaatagcagtttgtggaatggtaagtcaaaatggcatggacgaacaagggattagaaatttgtttagcttaattcctaagcgtgttagaatgcaaggtttccttcaatcggattatttgcacctttttcccaagttcgtagaagaggttggcaatttgtataaagagggcaaaataacatacttagaagatatgaaccagggcctagaatctggcccatgtgcgtttgcgggcctgttctcaggcataaacattggtaagcaagttatctgtgtttcaccagct

SEQ ID NO: 1393 - DNA, 963 bp, Unknown
  Nepeta cataria or Nepeta mussinii
atggccgataaagagggtgaagtggtgtgtgtcacaggtggttccggcttcataggtagttggttggtctctctgcttcttagaaggggttactcggtgcgagcgacagtcaaaaatttgggggacgagcgtgaaactaagcatttagaggcgattgaaggtgctgattctaggctgagcttattccaaattgacttgcttgattatgattcggttgctacagctgttggggacgccgctggcgtctttcatctagcatccccatgtactatagaccaggttaacgacccgcaacgagaacttctggatccagccattaaaggtacgcttaacgtcttaaaggcagcgaaaaacctaggtgttagaagagttgtggtaactagttctattagtgcaatgatagcatcgtctaactctttagctgagacaggtgaagattgttggattgatgaagattactgtagacaaaacggcttgtggtaccctgtaagcaaagcccttgctgaaaaggctgcctggaagctggctgaagaaaatggtttggacatcgttgtagttaacccaggaatggttgtaggccctatcctaccacctgctcttaattcctctatgcaactgatgttgcatgtcctccagggtaaagactttttcgaaggctttttcatgggtttggttcacgttaaagacgttgctctggcacaaatcttattatacgaaaatacttctgcttccggccgtcatttatgcgtggagtcgctaagtcgctacgatgattttgccaagcaaatggaaaagttatatcctgaatacaaacttcctagattttcaaacaatgcacaacatggctctttaaaatctgatgcagcattgaaaaaattaagagacttaggaattgaatttgctccactggaacaaatagtgaaagattcaattgagtctttgaggtcaaagggttatatttca

SEQ ID NO: 1394 - DNA, 945 bp, Unknown
  Nepeta cataria or Nepeta mussinii
atggcggatgctgtcgtacaaccagctgcacagagatatgcattgattacaggagccaacaagggcatcggctttcaaatatgccgacaactagaatcaaaaggtatagtagtgatcttagcctccagagacgaaaaaaggggaattaaagccagggagcgtttgctgaaagaattcggagtgtcgagcgataacgttgttttgcatcagcttgatgttgttgatcccgcctctgtggccgctgtctacgaatttattgaatctagatttgggcgcctcgacatcttggttaacaacgctggcatcaggggagcggatgttgatggtgatgtttcgctccttgaggaatacataaaagctgacggtgctacaattagtgctggtggcaaagccgaaccatttcatccaaaagctaatggaagattggtcgaaacgtttgaaaacgctgaggagtgtattgaaacaaattactacggtgcaaagagggtgacagaagctttgctgcccttgctccaccagtctgatagtcccagaatcgtcaatgtttcatccttgttgggctcattagtgttacaaacgaatgagcgggctaaaggtgtcttcagcaatgaagaaggcttgacccaagacaaagtcgatgaagtggtacaggaatttctgaaagattttaaagaaggaaagttggaagagaataactggccacctcactttccagcttataaagtttcgaaggaggcattgaacgcttacacaatgttactagcaaaaagaaatccgtcgttttgcaccaatgccgtatgcccaggtttttcgagaaccgatatgacctttaactctggtttgatatcagaaagtgaagcagccgaagcacctgtgaagcttgcactgttaccagatggtgggcctagcggctcatttttctacagggaagaagctttatctttg

SEQ ID NO: 1395 - DNA, 930 bp, Unknown
  Nepeta cataria or Nepeta mussinii
atgaaagcttggacttataaagaatatggcggtatcgaagttcttaaactagatagcgatgttccgatacccgagcctaaagcggaagaagttctaattaaagttgcagcggtcggtttgaatccaattgattttaagagaagactaggcttctatgaagccgatagagcaccatttcctgttgtcccgggttacgatgttgcaggagttgttgtaaaggttggtaatagggtgatgaactttgaagagggtgacgaagtctacggtgacgtggttgaaacagcattacaagacccaagatctttaggtacgttggccgaatataccattgctgaagaaaagttattggcccttaaaccaagaaatctggatttcgcagaagcggcctcacttccagtagctatccaaacagcatatcaagggttggaaagagccagattcagtgagggtaaatccattttggtgttaggtggcgcgggtggggtaggttcactcgtcatccaagtcgcgagatatgtcttcggagcatctaagatcgctgcaacttgtagtaccgctaacatggacctagttgaatccttaggtgctgatctagtcattgactattcaaatcacaattttgagaactacccagataagtttgatgtcgtctttgatactataggtcagtctgatcgtgctacaaaagcactaaaggagggtggttgcgtcgttgtcattgttggtgagcatgtcgatccaccgatgttctcttttacgctgaccgcttctggagagtatcttaacatgttgaatccttatttggaaacagggatgttaaagccggtcttagatcccaatggtacctttccttttgaccaagtcaacgaagcatttagctacctagagagtaacagagctatcggcaaagtagttgtttatcccatctca

SEQ ID NO: 1396 - DNA, 2589 bp, Unknown
  Valeriana officinalis or Saccharomyces cerevisiae
atgattatggaacttgtggaagcgactcgtaggaccttaaggaatgagtcatccgatagtaccgaaaagatgagactgattgactctttgcagaggcttgggttgaatcaccattttgagcaggatataaaggaaatgttgcaagactttgccaacgaacacaagaatacaaatcaggacctattcacgactagcctgcgttttaggctgttgagacataatggctttaatgttactccggacgttttcaataaatttacagaggaaaacggtaaatttaaggaatcactaggcgaggataccatcgggattctgtcactatacgaggcaagctatttagggggtaaaggtgaggagatactaagcgaggccatgaagttctccgaatccaagctgagggagtcaagtggtcacgtcgctccccacattcgtagacagatttttcaatccttggagctgccacgtcacctgagaatggctaggttggaatccaggcgttacatagaggaggattactcaaatgagatcggggctgatagctccttactggagctagctaagttagacttcaacagcgtccaagccctacatcagatggaattaacagagatctcaaggtggtggaaacaacttgggctgtcagacaaattgcccttcgcaagagatcgtccgctggaatgttttctgtggaccgtcggattgctaccagagccaaaatattccggatgtcgtattgagttggctaaaacaatagcggtattattggtgatagacgatatttttgatacctacggatcatacgaccagctaatattgtttacgaacgccattagacgttgggatttggacgcaatggacgagttgccggagtacatgaagatatgttatatggcattatacaatactaccaacgagatttgctacaaagtacttaaagaaaacgggtggtcagtccttccctacttagagcgtacttggattgacatggtagaggggttcatgttggaagccaaatggcttaatagcggggaacagccaaatttggaggcttacatagagaacggggtgacaaccgcggggtcttatatggcgcttgtgcatctgttcttcttaattggggatggcgtgaacgatgaaaacgtaaaactgctactagatccttatccaaaacttttttctagtgccgggcgtatccttagactttgggatgacctgggcaccgccaaagaagaacaggaaagaggagacgtttcatcatccatacaactttacatgaaagaaaaaaatgtacgtagtgagagcgaagggagagagggcatcgtagagataatctataacctttggaaagacatgaacggcgaactaatcgggtccaacgcgctaccccaagcaataatagaaacaagctttaacatggcgaggactagccaggtggtctatcaacacgaggacgacacatatttctcctcagttgacaattacgtccagagtctgttcttcaccccagttagcgtgtccgtgggcggtggatctatggcttcagaaaaagaaattaggagagagagattcttgaacgttttccctaaattagtagaggaattgaacgcatcgcttttggcttacggtatgcctaaggaagcatgtgactggtatgcccactcattgaactacaacactccaggcggtaagctaaatagaggtttgtccgttgtggacacgtatgctattctctccaacaagaccgttgaacaattggggcaagaagaatacgaaaaggttgccattctaggttggtgcattgagttgttgcaggcttactggttggtcgccgatgatatgatggacaagtccattaccagaagaggccaaccatgttggtacaaggttcctgaagttggggaaattgccatctgggacgcattcatgttagaggctgctatctacaagcttttgaaatctcacttcagaaacgaaaaatactacatagatatcaccgaattgttccatgaggtcaccttccaaaccgaattgggccaattgatggacttaatcactgcacctgaagacaaagtcgacttgagtaagttctccctaaagaagcactccttcatagttactttcgagactgcttactattctttctacttgcctgtcgcattggccatgtacgttgccggtatcacggatgaaaaggatttgaaacaagccagagatgtcttgattccattgggtgaatacttccaaattcaagatgactacttagactgcttcggtaccccagaacagatcggtaagatcggtacagatatccaagataacaaatgttcttgggtaatcaacaaggcattggaacttgcttccgcagaacaaagaaagactttagacgaaaattacggtaagaaggactcagtcgcagaagccaaatgcaaaaagattttcaatgacttgaaaattgaacagctataccacgaatatgaagagtctattgccaaggatttgaaggccaaaatttctcaggtcgatgagtctcgtggcttcaaagctgatgtcttaactgcgttcttgaacaaagtttacaagagaagcaaa

SEQ ID NO: 1397 - DNA, 2709 bp, Catharanthus roseus
atgagctcctcatcctcttcaagctcatcaatgagcctaccactagctactcctttaataaaggacaatgaatcattgattaagttcctacgccaaccacttgtattaccacatgaggttgacgattctacaaagcgtagagaattactagagcgtacaagaaaagaacttgaattaaacgctgaaaagcctctagaagctcttaaaatgatagatattattcagcgcttgggattatcatatcattttgaagatgatattaattctattctaaccggtttttcaaatatctcaagtcaaacacacgaagacttattgactgcttctttgtgcttcagattgctccgtcacaacggtcataaaataaatccagatattttccaaaagttcatggataataatggtaaattcaaagactctctaaaggatgatacgttgggtatgttatcactgtatgaagcctcttacttgggagctaatggcgaagaaattctaatggaagcacaagaattcacgaagactcatctgaagaacagtctacctgcaatggcaccttctctaagtaaaaaggtgtcacaagctcttgagcagcctagacacagacgaatgttgagattagaagctagacggttcatagaagaatacggtgccgaaaatgatcataatcctgatttgctagaattggcgaaattggattataataaggtgcaatccttacatcaaatggaactctctgagattacaagatggtggaaacaattgggcctagttgataaattaactttcgccagagacagacccttagagtgttttttgtggactgttggcttattacctgaaccaaaatacagcggatgtaggattgaattagctaagacaatcgctatcttattggtaatagacgacatttttgatactcacggtaccttagatgaacttctattatttactaacgccataaagagatgggatttagaagctatggaagacttacctgagtatatgcgtatctgttatatggctctttataacaccactaatgagatttgctataaagtcctgaaggagaatggatggtcagtattaccatatttgaaggccacatggatagacatgatcgagggttttatggtcgaggctgaatggtttaactccgactacgtgccaaacatggaagagtatgtagaaaatggtgtgcgtactgcaggtagttacatggcgctggttcacttattttttttgattggacaaggggtaactgaagataatgtcaaattattgatcaaaccctacccaaaattatttagcagttccggaagaattttacgcctttgggatgatctcggtactgcaaaggaagaacaagaaagaggggacctcgcttcatctatccaattgtttatgagggaaaaagaaattaaaagtgaggaggaaggtcgaaaaggtattttagaaatcattgagaatctatggaaggaacttaatggggaactagtttatcgtgaagaaatgccgctggctataattaagactgcattcaatatggctagggcgtctcaagtagtctatcaacatgaagaagatacttatttttccagcgtagacaactacgttaaggcactattctttacaccgtgtttcggcggtggatctatggcttcagaaaaagaaattaggagagagagattcttgaacgttttccctaaattagtagaggaattgaacgcatcgcttttggcttacggtatgcctaaggaagcatgtgactggtatgcccactcattgaactacaacactccaggcggtaagctaaatagaggtttgtccgttgtggacacgtatgctattctctccaacaagaccgttgaacaattggggcaagaagaatacgaaaaggttgccattctaggttggtgcattgagttgttgcaggcttactggttggtcgccgatgatatgatggacaagtccattaccagaagaggccaaccatgttggtacaaggttcctgaagttggggaaattgccatctgggacgcattcatgttagaggctgctatctacaagcttttgaaatctcacttcagaaacgaaaaatactacatagatatcaccgaattgttccatgaggtcaccttccaaaccgaattgggccaattgatggacttaatcactgcacctgaagacaaagtcgacttgagtaagttctccctaaagaagcactccttcatagttactttcgagactgcttactattctttctacttgcctgtcgcattggccatgtacgttgccggtatcacggatgaaaaggatttgaaacaagccagagatgtcttgattccattgggtgaatacttccaaattcaagatgactacttagactgcttcggtaccccagaacagatcggtaagatcggtacagatatccaagataacaaatgttcttgggtaatcaacaaggcattggaacttgcttccgcagaacaaagaaagactttagacgaaaattacggtaagaaggactcagtcgcagaagccaaatgcaaaaagattttcaatgacttgaaaattgaacagctataccacgaatatgaagagtctattgccaaggatttgaaggccaaaatttctcaggtcgatgagtctcgtggcttcaaagctgatgtcttaactgcgttcttgaacaaagtttacaagagaagcaaa

SEQ ID NO: 1398 - DNA, 3483 bp, Artificial Sequence
  G8H-CPR engineered fusion
atgacttcagctctctatgctagcgatttatttaaacaattgaagtctatcatgggtacagatagcttaagtgatgatgtagttctagtaatcgcaacaacgagtttggccttagttgctggttttgtcgttctcttgtggaaaaaaacgactgcagacagatcaggtgagttgaaaccactgatgattccaaaatctctgatggctaaagacgaagatgatgacttggatcttggctctggcaagacaagagtttctatcttttttggtacacaaactggtacggctgaagggttcgccaaagccttaagtgaagaaattaaagcaaggtatgaaaaggcggccgtgaaagatgactacgctgcagatgatgaccaatacgaagaaaagctcaaaaaagagactcttgcttttttctgcgttgctacgtacggtgatggagaaccaacagacaacgccgcgagattttataaatggtttactgaagaaaatgaaagagacattaagcttcagcagctagcatacggagttttcgctctcggtaatagacagtatgaacattttaacaagattggaatagtcctagatgaggaattgtgcaaaaaaggagctaagagactgattgaagttggattgggtgatgatgatcagtcaattgaagatgattttaatgcgtggaaagagtcgttgtggagcgaattagataagctactgaaggatgaagatgataaatctgtggctacaccctacaccgccgttatcccagagtacagggtagttacccatgatcctagatttacaactcaaaaatccatggagagtaatgtggcaaacggaaataccactatcgatatccatcatccctgtcgtgtagacgttgctgtgcagaaagagttacacactcatgaatctgatagatcttgtattcacttggagttcgacatttcgagaacaggtataacatacgaaactggggatcacgtcggtgtttatgccgaaaatcatgttgagatcgttgaagaagccggtaaacttttgggtcacagtttggaccttgttttttcaattcacgccgataaagaggacggctcacctttagaatctgcagtgccccccccctttccggggccatgtacgcttggcacaggtctagcgagatacgcagatcttctcaatccacctagaaagtcagctctcgttgcattagcagcttatgcaactgaaccgtctgaggccgagaagttgaagcacttgacctctccggatggtaaagatgagtatagtcagtggattgtagcatctcagagaagtttattggaggtcatggctgcttttccaagcgctaagcctcctctaggtgtctttttcgctgctatcgctcctaggctacagccgagatattacagcatatcatcctctccaagattggctccatcgcgcgtacacgtgacttccgctctggtatatggaccaaccccaaccggtagaattcacaaaggtgtctgctcaacatggatgaaaaacgcagtgccagccgagaagtcacatgagtgtagtggtgctccaatattcataagagcctctaatttcaaacttccaagcaatccgtctacaccaatcgtcatggttggtcccggaacaggtttggctccatttaggggatttctacaagagaggatggcattaaaagaagatggtgaagaattagggagctcgttgttatttttcggatgccgaaatcgtcaaatggacttcatttacgaagatgaattgaacaactttgttgaccaaggtgttatttcagagctaataatggcgttcagtagagaaggagcacaaaaagaatacgtccaacataaaatgatggaaaaagctgcccaagtttgggatttgattaaagaagaaggttatttatatgtgtgtggagatgctaaaggtatggcaagagatgttcataggacacttcatactatagttcaggaacaagaaggcgtatcgagtagcgaggcggaggctatagttaaaaaattgcaaacagagggtcgttacctgagagatgtgtggggcagtacttcctctggtactaaaaacttacctccaggtccgtcgccactgccatttatcggttctttacatctattgggtgatcaacctcataagtccttggctaaattgtcaaagaaacacggaccgattatgtcgctaaaattaggtcaaatcactaccattgttatatcttcatccaccatggcgaaggaagttttgcagaagcaggatttggccttttcatctagatctgtaccgaatgcgttgcacgcccataaccaatttaaattcagcgttgtatggctaccagtggcatcaaggtggaggtcactcagaaaggtccttaattccaatattttctcgggaaatagattagacgcaaaccaacacttgagaacacggaaagtccaggaattaatagcatactgtagaaaaaactcgcaaagtggtgaagccgtggatgtgggtagagccgcatttagaacttcattaaatctattgtccaatcttattttctcaaaagatctaacggacccatacagcgactctgcaaaagaattcaaggatcttgtttggaacatcatggttgaagcaggcaaacccaacttagtggactttttcccattattagaaaaagttgatccacaaggaatcagacatcgaatgactattcattttggtgaagtgctaaagttatttggtggtttagtcaacgagagactagaacaaaggaggtcaaaaggcgaaaagaacgatgtcctggatgtcttacttactacttcacaggaaagtcctgaagagattgatagaactcacattgaaagaatgtgtttagatttattcgtcgcaggtaccgatacgacaagttctacattagagtgggctatgtcagagatgcttaagaatccagacaaaatgaagaaaactcaagatgaactagctcaagttattggcaggggtaaaaccattgaagaatcagatattaatcgtctaccttatttgaggtgtgtcatgaaggaaactttaagaatacatcctcctgtaccattcctgattccaagaaaggttgagcaatccgttgaagtttgtggttataatgtaccgaaaggttcacaagtattagtcaatgcctgggcaattggcagagacgaaactgtatgggacgatgccttagcattcaagccagaacgctttatggaaagtgaactagatatacgaggcagagactttgagttgattccatttggtgctggccggagaatttgtcctgggttaccgttagctttgcgtacagttccacttatgttgggatccctacttaactcattcaattggaaattggaagggggaatggctcctaaggacttggacatggaggaaaaatttggcatcactttgcaaaaggcacacccacttagagccgtaccatcgactcta

SEQ ID NO: 1399 - DNA, 3477 bp, Artificial Sequence
  G8H-CPR engineered fusion
atgacttcagctctctatgctagcgatttatttaaacaattgaagtctatcatgggtacagatagcttaagtgatgatgtagttctagtaatcgcaacaacgagtttggccttagttgctggttttgtcgttctcttgtggaaaaaaacgactgcagacagatcaggtgagttgaaaccactgatgattccaaaatctctgatggctaaagacgaagatgatgacttggatcttggctctggcaagacaagagtttctatcttttttggtacacaaactggtacggctgaagggttcgccaaagccttaagtgaagaaattaaagcaaggtatgaaaaggcggccgtgaaagatgactacgctgcagatgatgaccaatacgaagaaaagctcaaaaaagagactcttgcttttttctgcgttgctacgtacggtgatggagaaccaacagacaacgccgcgagattttataaatggtttactgaagaaaatgaaagagacattaagcttcagcagctagcatacggagttttcgctctcggtaatagacagtatgaacattttaacaagattggaatagtcctagatgaggaattgtgcaaaaaaggagctaagagactgattgaagttggattgggtgatgatgatcagtcaattgaagatgattttaatgcgtggaaagagtcgttgtggagcgaattagataagctactgaaggatgaagatgataaatctgtggctacaccctacaccgccgttatcccagagtacagggtagttacccatgatcctagatttacaactcaaaaatccatggagagtaatgtggcaaacggaaataccactatcgatatccatcatccctgtcgtgtagacgttgctgtgcagaaagagttacacactcatgaatctgatagatcttgtattcacttggagttcgacatttcgagaacaggtataacatacgaaactggggatcacgtcggtgtttatgccgaaaatcatgttgagatcgttgaagaagccggtaaacttttgggtcacagtttggaccttgttttttcaattcacgccgataaagaggacggctcacctttagaatctgcagtgccccccccctttccggggccatgtacgcttggcacaggtctagcgagatacgcagatcttctcaatccacctagaaagtcagctctcgttgcattagcagcttatgcaactgaaccgtctgaggccgagaagttgaagcacttgacctctccggatggtaaagatgagtatagtcagtggattgtagcatctcagagaagtttattggaggtcatggctgcttttccaagcgctaagcctcctctaggtgtctttttcgctgctatcgctcctaggctacagccgagatattacagcatatcatcctctccaagattggctccatcgcgcgtacacgtgacttccgctctggtatatggaccaaccccaaccggtagaattcacaaaggtgtctgctcaacatggatgaaaaacgcagtgccagccgagaagtcacatgagtgtagtggtgctccaatattcataagagcctctaatttcaaacttccaagcaatccgtctacaccaatcgtcatggttggtcccggaacaggtttggctccatttaggggatttctacaagagaggatggcattaaaagaagatggtgaagaattagggagctcgttgttatttttcggatgccgaaatcgtcaaatggacttcatttacgaagatgaattgaacaactttgttgaccaaggtgttatttcagagctaataatggcgttcagtagagaaggagcacaaaaagaatacgtccaacataaaatgatggaaaaagctgcccaagtttgggatttgattaaagaagaaggttatttatatgtgtgtggagatgctaaaggtatggcaagagatgttcataggacacttcatactatagttcaggaacaagaaggcgtatcgagtagcgaggcggaggctatagttaaaaaattgcaaacagagggtcgttacctgagagatgtgtggggcagtacttcctctggtggaaagaatctacccccaggtcccactcctttaccatttattggtaatttacacttgctcggtcatcatccccataagtctttggcacgtcttgccaagacttatggtccattgatgttacttagactagggtctgaaaatactgtggtcgtatcttcggctgccgttgctaaagaagtattgcaaaaacatgatttggcctttagttctcgatccatacctgatgcagttcatgcacacgatcaattcaagtactccgtggtttggttgccagttgcctctagatggagatctttaagaaaaactatgaactccaatatcttttcgggctcctgcttagatgccaatcagcatttaagaagtaggaaggttgaagaattaatcgcctattgtaaagaaagctgtaggcgtgctgaagcagtagacgtcgggcgtgctgctttcagaaccgctttaaattctttgtcaaacacaattttttctcgagaccttgctgatccattatccgactctggtaaggaatttaaggacgttgtttcttcgatcatgatggaggcgggcaagccaaacagtgtagactactatccgttcctgtctcgattcgatccccaaggaatccgtagaaggaccgcaatctattttgataaactgattaacatcttcaagggtttgattgacgaacgtctcgaaaaaagaaggtcgcagtacgaagaggctacggatgtaatcgatatattacttaacactattgaacagaacccagaagaaatcgaccgaactcatatcgagagaatgttcttagatctctttttggctggtacagatacgacatcttcgacggtcgaatgggccatggctgaagccatgaagaacccagaaaccatgaagaaagctaaggcggaattagctcaagttatcggcaaggggaaaatagtccaagaaactgatataccacacctaccatatttgcaatgcatcgtaaaggagacactacgattacacccacctgtacccttccttatcccacgtcgtgttcatgaagacgtggacatattgggttatgtcgttccaaataactcacaagtgttcgttaacatgtgggccattgggagggacccagatatgtggaaaaatccattacaatttgatcccgaccgttttcatgattccgaagtcggtctgagaggtaaagattttgaattgattcccttcggcgctggcagaagaatttgcccaggattacctttggctatgcgtatggtgcctgttgttttaggatctctcttgaactccttcgattggaaggtcgaaggtggtaaagaactggaaatgaatgaaaagtttggaataactcttgaaaaagcacaacctttaatggcagtacccatcgcatta

SEQ ID NO: 1400 - DNA, 3495 bp, Artificial Sequence
  G8H-CPR engineered fusion
atgacttcagctctctatgctagcgatttatttaaacaattgaagtctatcatgggtacagatagcttaagtgatgatgtagttctagtaatcgcaacaacgagtttggccttagttgctggttttgtcgttctcttgtggaaaaaaacgactgcagacagatcaggtgagttgaaaccactgatgattccaaaatctctgatggctaaagacgaagatgatgacttggatcttggctctggcaagacaagagtttctatcttttttggtacacaaactggtacggctgaagggttcgccaaagccttaagtgaagaaattaaagcaaggtatgaaaaggcggccgtgaaagatgactacgctgcagatgatgaccaatacgaagaaaagctcaaaaaagagactcttgcttttttctgcgttgctacgtacggtgatggagaaccaacagacaacgccgcgagattttataaatggtttactgaagaaaatgaaagagacattaagcttcagcagctagcatacggagttttcgctctcggtaatagacagtatgaacattttaacaagattggaatagtcctagatgaggaattgtgcaaaaaaggagctaagagactgattgaagttggattgggtgatgatgatcagtcaattgaagatgattttaatgcgtggaaagagtcgttgtggagcgaattagataagctactgaaggatgaagatgataaatctgtggctacaccctacaccgccgttatcccagagtacagggtagttacccatgatcctagatttacaactcaaaaatccatggagagtaatgtggcaaacggaaataccactatcgatatccatcatccctgtcgtgtagacgttgctgtgcagaaagagttacacactcatgaatctgatagatcttgtattcacttggagttcgacatttcgagaacaggtataacatacgaaactggggatcacgtcggtgtttatgccgaaaatcatgttgagatcgttgaagaagccggtaaacttttgggtcacagtttggaccttgttttttcaattcacgccgataaagaggacggctcacctttagaatctgcagtgccccccccctttccggggccatgtacgcttggcacaggtctagcgagatacgcagatcttctcaatccacctagaaagtcagctctcgttgcattagcagcttatgcaactgaaccgtctgaggccgagaagttgaagcacttgacctctccggatggtaaagatgagtatagtcagtggattgtagcatctcagagaagtttattggaggtcatggctgcttttccaagcgctaagcctcctctaggtgtctttttcgctgctatcgctcctaggctacagccgagatattacagcatatcatcctctccaagattggctccatcgcgcgtacacgtgacttccgctctggtatatggaccaaccccaaccggtagaattcacaaaggtgtctgctcaacatggatgaaaaacgcagtgccagccgagaagtcacatgagtgtagtggtgctccaatattcataagagcctctaatttcaaacttccaagcaatccgtctacaccaatcgtcatggttggtcccggaacaggtttggctccatttaggggatttctacaagagaggatggcattaaaagaagatggtgaagaattagggagctcgttgttatttttcggatgccgaaatcgtcaaatggacttcatttacgaagatgaattgaacaactttgttgaccaaggtgttatttcagagctaataatggcgttcagtagagaaggagcacaaaaagaatacgtccaacataaaatgatggaaaaagctgcccaagtttgggatttgattaaagaagaaggttatttatatgtgtgtggagatgctaaaggtatggcaagagatgttcataggacacttcatactatagttcaggaacaagaaggcgtatcgagtagcgaggcggaggctatagttaaaaaattgcaaacagagggtcgttacctgagagatgtgtggggttctacttcctccggttcctcaggcggaactaaaaacttacctccaggtccgtcgccactgccatttatcggttctttacatctattgggtgatcaacctcataagtccttggctaaattgtcaaagaaacacggaccgattatgtcgctaaaattaggtcaaatcactaccattgttatatcttcatccaccatggcgaaggaagttttgcagaagcaggatttggccttttcatctagatctgtaccgaatgcgttgcacgcccataaccaatttaaattcagcgttgtatggctaccagtggcatcaaggtggaggtcactcagaaaggtccttaattccaatattttctcgggaaatagattagacgcaaaccaacacttgagaacacggaaagtccaggaattaatagcatactgtagaaaaaactcgcaaagtggtgaagccgtggatgtgggtagagccgcatttagaacttcattaaatctattgtccaatcttattttctcaaaagatctaacggacccatacagcgactctgcaaaagaattcaaggatcttgtttggaacatcatggttgaagcaggcaaacccaacttagtggactttttcccattattagaaaaagttgatccacaaggaatcagacatcgaatgactattcattttggtgaagtgctaaagttatttggtggtttagtcaacgagagactagaacaaaggaggtcaaaaggcgaaaagaacgatgtcctggatgtcttacttactacttcacaggaaagtcctgaagagattgatagaactcacattgaaagaatgtgtttagatttattcgtcgcaggtaccgatacgacaagttctacattagagtgggctatgtcagagatgcttaagaatccagacaaaatgaagaaaactcaagatgaactagctcaagttattggcaggggtaaaaccattgaagaatcagatattaatcgtctaccttatttgaggtgtgtcatgaaggaaactttaagaatacatcctcctgtaccattcctgattccaagaaaggttgagcaatccgttgaagtttgtggttataatgtaccgaaaggttcacaagtattagtcaatgcctgggcaattggcagagacgaaactgtatgggacgatgccttagcattcaagccagaacgctttatggaaagtgaactagatatacgaggcagagactttgagttgattccatttggtgctggccggagaatttgtcctgggttaccgttagctttgcgtacagttccacttatgttgggatccctacttaactcattcaattggaaattggaagggggaatggctcctaaggacttggacatggaggaaaaatttggcatcactttgcaaaaggcacacccacttagagccgtaccatcgactcta

SEQ ID NO: 1401 - DNA, 3489 bp, Artificial Sequence
  G8H-CPR engineered fusion
atgacttcagctctctatgctagcgatttatttaaacaattgaagtctatcatgggtacagatagcttaagtgatgatgtagttctagtaatcgcaacaacgagtttggccttagttgctggttttgtcgttctcttgtggaaaaaaacgactgcagacagatcaggtgagttgaaaccactgatgattccaaaatctctgatggctaaagacgaagatgatgacttggatcttggctctggcaagacaagagtttctatcttttttggtacacaaactggtacggctgaagggttcgccaaagccttaagtgaagaaattaaagcaaggtatgaaaaggcggccgtgaaagatgactacgctgcagatgatgaccaatacgaagaaaagctcaaaaaagagactcttgcttttttctgcgttgctacgtacggtgatggagaaccaacagacaacgccgcgagattttataaatggtttactgaagaaaatgaaagagacattaagcttcagcagctagcatacggagttttcgctctcggtaatagacagtatgaacattttaacaagattggaatagtcctagatgaggaattgtgcaaaaaaggagctaagagactgattgaagttggattgggtgatgatgatcagtcaattgaagatgattttaatgcgtggaaagagtcgttgtggagcgaattagataagctactgaaggatgaagatgataaatctgtggctacaccctacaccgccgttatcccagagtacagggtagttacccatgatcctagatttacaactcaaaaatccatggagagtaatgtggcaaacggaaataccactatcgatatccatcatccctgtcgtgtagacgttgctgtgcagaaagagttacacactcatgaatctgatagatcttgtattcacttggagttcgacatttcgagaacaggtataacatacgaaactggggatcacgtcggtgtttatgccgaaaatcatgttgagatcgttgaagaagccggtaaacttttgggtcacagtttggaccttgttttttcaattcacgccgataaagaggacggctcacctttagaatctgcagtgccccccccctttccggggccatgtacgcttggcacaggtctagcgagatacgcagatcttctcaatccacctagaaagtcagctctcgttgcattagcagcttatgcaactgaaccgtctgaggccgagaagttgaagcacttgacctctccggatggtaaagatgagtatagtcagtggattgtagcatctcagagaagtttattggaggtcatggctgcttttccaagcgctaagcctcctctaggtgtctttttcgctgctatcgctcctaggctacagccgagatattacagcatatcatcctctccaagattggctccatcgcgcgtacacgtgacttccgctctggtatatggaccaaccccaaccggtagaattcacaaaggtgtctgctcaacatggatgaaaaacgcagtgccagccgagaagtcacatgagtgtagtggtgctccaatattcataagagcctctaatttcaaacttccaagcaatccgtctacaccaatcgtcatggttggtcccggaacaggtttggctccatttaggggatttctacaagagaggatggcattaaaagaagatggtgaagaattagggagctcgttgttatttttcggatgccgaaatcgtcaaatggacttcatttacgaagatgaattgaacaactttgttgaccaaggtgttatttcagagctaataatggcgttcagtagagaaggagcacaaaaagaatacgtccaacataaaatgatggaaaaagctgcccaagtttgggatttgattaaagaagaaggttatttatatgtgtgtggagatgctaaaggtatggcaagagatgttcataggacacttcatactatagttcaggaacaagaaggcgtatcgagtagcgaggcggaggctatagttaaaaaattgcaaacagagggtcgttacctgagagatgtgtggggttctacttcctccggttcctcaggcggaggaaagaatctacccccaggtcccactcctttaccatttattggtaatttacacttgctcggtcatcatccccataagtctttggcacgtcttgccaagacttatggtccattgatgttacttagactagggtctgaaaatactgtggtcgtatcttcggctgccgttgctaaagaagtattgcaaaaacatgatttggcctttagttctcgatccatacctgatgcagttcatgcacacgatcaattcaagtactccgtggtttggttgccagttgcctctagatggagatctttaagaaaaactatgaactccaatatcttttcgggctcctgcttagatgccaatcagcatttaagaagtaggaaggttgaagaattaatcgcctattgtaaagaaagctgtaggcgtgctgaagcagtagacgtcgggcgtgctgctttcagaaccgctttaaattctttgtcaaacacaattttttctcgagaccttgctgatccattatccgactctggtaaggaatttaaggacgttgtttcttcgatcatgatggaggcgggcaagccaaacagtgtagactactatccgttcctgtctcgattcgatccccaaggaatccgtagaaggaccgcaatctattttgataaactgattaacatcttcaagggtttgattgacgaacgtctcgaaaaaagaaggtcgcagtacgaagaggctacggatgtaatcgatatattacttaacactattgaacagaacccagaagaaatcgaccgaactcatatcgagagaatgttcttagatctctttttggctggtacagatacgacatcttcgacggtcgaatgggccatggctgaagccatgaagaacccagaaaccatgaagaaagctaaggcggaattagctcaagttatcggcaaggggaaaatagtccaagaaactgatataccacacctaccatatttgcaatgcatcgtaaaggagacactacgattacacccacctgtacccttccttatcccacgtcgtgttcatgaagacgtggacatattgggttatgtcgttccaaataactcacaagtgttcgttaacatgtgggccattgggagggacccagatatgtggaaaaatccattacaatttgatcccgaccgttttcatgattccgaagtcggtctgagaggtaaagattttgaattgattcccttcggcgctggcagaagaatttgcccaggattacctttggctatgcgtatggtgcctgttgttttaggatctctcttgaactccttcgattggaaggtcgaaggtggtaaagaactggaaatgaatgaaaagtttggaataactcttgaaaaagcacaacctttaatggcagtacccatcgcatta

SEQ ID NO: 1402 - DNA, 3510 bp, Artificial Sequence
  G8H-CPR engineered fusion
atgacttcagctctctatgctagcgatttatttaaacaattgaagtctatcatgggtacagatagcttaagtgatgatgtagttctagtaatcgcaacaacgagtttggccttagttgctggttttgtcgttctcttgtggaaaaaaacgactgcagacagatcaggtgagttgaaaccactgatgattccaaaatctctgatggctaaagacgaagatgatgacttggatcttggctctggcaagacaagagtttctatcttttttggtacacaaactggtacggctgaagggttcgccaaagccttaagtgaagaaattaaagcaaggtatgaaaaggcggccgtgaaagatgactacgctgcagatgatgaccaatacgaagaaaagctcaaaaaagagactcttgcttttttctgcgttgctacgtacggtgatggagaaccaacagacaacgccgcgagattttataaatggtttactgaagaaaatgaaagagacattaagcttcagcagctagcatacggagttttcgctctcggtaatagacagtatgaacattttaacaagattggaatagtcctagatgaggaattgtgcaaaaaaggagctaagagactgattgaagttggattgggtgatgatgatcagtcaattgaagatgattttaatgcgtggaaagagtcgttgtggagcgaattagataagctactgaaggatgaagatgataaatctgtggctacaccctacaccgccgttatcccagagtacagggtagttacccatgatcctagatttacaactcaaaaatccatggagagtaatgtggcaaacggaaataccactatcgatatccatcatccctgtcgtgtagacgttgctgtgcagaaagagttacacactcatgaatctgatagatcttgtattcacttggagttcgacatttcgagaacaggtataacatacgaaactggggatcacgtcggtgtttatgccgaaaatcatgttgagatcgttgaagaagccggtaaacttttgggtcacagtttggaccttgttttttcaattcacgccgataaagaggacggctcacctttagaatctgcagtgccccccccctttccggggccatgtacgcttggcacaggtctagcgagatacgcagatcttctcaatccacctagaaagtcagctctcgttgcattagcagcttatgcaactgaaccgtctgaggccgagaagttgaagcacttgacctctccggatggtaaagatgagtatagtcagtggattgtagcatctcagagaagtttattggaggtcatggctgcttttccaagcgctaagcctcctctaggtgtctttttcgctgctatcgctcctaggctacagccgagatattacagcatatcatcctctccaagattggctccatcgcgcgtacacgtgacttccgctctggtatatggaccaaccccaaccggtagaattcacaaaggtgtctgctcaacatggatgaaaaacgcagtgccagccgagaagtcacatgagtgtagtggtgctccaatattcataagagcctctaatttcaaacttccaagcaatccgtctacaccaatcgtcatggttggtcccggaacaggtttggctccatttaggggatttctacaagagaggatggcattaaaagaagatggtgaagaattagggagctcgttgttatttttcggatgccgaaatcgtcaaatggacttcatttacgaagatgaattgaacaactttgttgaccaaggtgttatttcagagctaataatggcgttcagtagagaaggagcacaaaaagaatacgtccaacataaaatgatggaaaaagctgcccaagtttgggatttgattaaagaagaaggttatttatatgtgtgtggagatgctaaaggtatggcaagagatgttcataggacacttcatactatagttcaggaacaagaaggcgtatcgagtagcgaggcggaggctatagttaaaaaattgcaaacagagggtcgttacctgagagatgtgtggggtggcggctctggcggaagcacatctagcggtagttccggtggtactaaaaacttacctccaggtccgtcgccactgccatttatcggttctttacatctattgggtgatcaacctcataagtccttggctaaattgtcaaagaaacacggaccgattatgtcgctaaaattaggtcaaatcactaccattgttatatcttcatccaccatggcgaaggaagttttgcagaagcaggatttggccttttcatctagatctgtaccgaatgcgttgcacgcccataaccaatttaaattcagcgttgtatggctaccagtggcatcaaggtggaggtcactcagaaaggtccttaattccaatattttctcgggaaatagattagacgcaaaccaacacttgagaacacggaaagtccaggaattaatagcatactgtagaaaaaactcgcaaagtggtgaagccgtggatgtgggtagagccgcatttagaacttcattaaatctattgtccaatcttattttctcaaaagatctaacggacccatacagcgactctgcaaaagaattcaaggatcttgtttggaacatcatggttgaagcaggcaaacccaacttagtggactttttcccattattagaaaaagttgatccacaaggaatcagacatcgaatgactattcattttggtgaagtgctaaagttatttggtggtttagtcaacgagagactagaacaaaggaggtcaaaaggcgaaaagaacgatgtcctggatgtcttacttactacttcacaggaaagtcctgaagagattgatagaactcacattgaaagaatgtgtttagatttattcgtcgcaggtaccgatacgacaagttctacattagagtgggctatgtcagagatgcttaagaatccagacaaaatgaagaaaactcaagatgaactagctcaagttattggcaggggtaaaaccattgaagaatcagatattaatcgtctaccttatttgaggtgtgtcatgaaggaaactttaagaatacatcctcctgtaccattcctgattccaagaaaggttgagcaatccgttgaagtttgtggttataatgtaccgaaaggttcacaagtattagtcaatgcctgggcaattggcagagacgaaactgtatgggacgatgccttagcattcaagccagaacgctttatggaaagtgaactagatatacgaggcagagactttgagttgattccatttggtgctggccggagaatttgtcctgggttaccgttagctttgcgtacagttccacttatgttgggatccctacttaactcattcaattggaaattggaagggggaatggctcctaaggacttggacatggaggaaaaatttggcatcactttgcaaaaggcacacccacttagagccgtaccatcgactcta

SEQ ID NO: 1403 - DNA, 3504 bp, Artificial Sequence
  G8H-CPR engineered fusion
atgacttcagctctctatgctagcgatttatttaaacaattgaagtctatcatgggtacagatagcttaagtgatgatgtagttctagtaatcgcaacaacgagtttggccttagttgctggttttgtcgttctcttgtggaaaaaaacgactgcagacagatcaggtgagttgaaaccactgatgattccaaaatctctgatggctaaagacgaagatgatgacttggatcttggctctggcaagacaagagtttctatcttttttggtacacaaactggtacggctgaagggttcgccaaagccttaagtgaagaaattaaagcaaggtatgaaaaggcggccgtgaaagatgactacgctgcagatgatgaccaatacgaagaaaagctcaaaaaagagactcttgcttttttctgcgttgctacgtacggtgatggagaaccaacagacaacgccgcgagattttataaatggtttactgaagaaaatgaaagagacattaagcttcagcagctagcatacggagttttcgctctcggtaatagacagtatgaacattttaacaagattggaatagtcctagatgaggaattgtgcaaaaaaggagctaagagactgattgaagttggattgggtgatgatgatcagtcaattgaagatgattttaatgcgtggaaagagtcgttgtggagcgaattagataagctactgaaggatgaagatgataaatctgtggctacaccctacaccgccgttatcccagagtacagggtagttacccatgatcctagatttacaactcaaaaatccatggagagtaatgtggcaaacggaaataccactatcgatatccatcatccctgtcgtgtagacgttgctgtgcagaaagagttacacactcatgaatctgatagatcttgtattcacttggagttcgacatttcgagaacaggtataacatacgaaactggggatcacgtcggtgtttatgccgaaaatcatgttgagatcgttgaagaagccggtaaacttttgggtcacagtttggaccttgttttttcaattcacgccgataaagaggacggctcacctttagaatctgcagtgccccccccctttccggggccatgtacgcttggcacaggtctagcgagatacgcagatcttctcaatccacctagaaagtcagctctcgttgcattagcagcttatgcaactgaaccgtctgaggccgagaagttgaagcacttgacctctccggatggtaaagatgagtatagtcagtggattgtagcatctcagagaagtttattggaggtcatggctgcttttccaagcgctaagcctcctctaggtgtctttttcgctgctatcgctcctaggctacagccgagatattacagcatatcatcctctccaagattggctccatcgcgcgtacacgtgacttccgctctggtatatggaccaaccccaaccggtagaattcacaaaggtgtctgctcaacatggatgaaaaacgcagtgccagccgagaagtcacatgagtgtagtggtgctccaatattcataagagcctctaatttcaaacttccaagcaatccgtctacaccaatcgtcatggttggtcccggaacaggtttggctccatttaggggatttctacaagagaggatggcattaaaagaagatggtgaagaattagggagctcgttgttatttttcggatgccgaaatcgtcaaatggacttcatttacgaagatgaattgaacaactttgttgaccaaggtgttatttcagagctaataatggcgttcagtagagaaggagcacaaaaagaatacgtccaacataaaatgatggaaaaagctgcccaagtttgggatttgattaaagaagaaggttatttatatgtgtgtggagatgctaaaggtatggcaagagatgttcataggacacttcatactatagttcaggaacaagaaggcgtatcgagtagcgaggcggaggctatagttaaaaaattgcaaacagagggtcgttacctgagagatgtgtggggtggcggctctggcggaagcacatctagcggtagttccggtggtggaaagaatctacccccaggtcccactcctttaccatttattggtaatttacacttgctcggtcatcatccccataagtctttggcacgtcttgccaagacttatggtccattgatgttacttagactagggtctgaaaatactgtggtcgtatcttcggctgccgttgctaaagaagtattgcaaaaacatgatttggcctttagttctcgatccatacctgatgcagttcatgcacacgatcaattcaagtactccgtggtttggttgccagttgcctctagatggagatctttaagaaaaactatgaactccaatatcttttcgggctcctgcttagatgccaatcagcatttaagaagtaggaaggttgaagaattaatcgcctattgtaaagaaagctgtaggcgtgctgaagcagtagacgtcgggcgtgctgctttcagaaccgctttaaattctttgtcaaacacaattttttctcgagaccttgctgatccattatccgactctggtaaggaatttaaggacgttgtttcttcgatcatgatggaggcgggcaagccaaacagtgtagactactatccgttcctgtctcgattcgatccccaaggaatccgtagaaggaccgcaatctattttgataaactgattaacatcttcaagggtttgattgacgaacgtctcgaaaaaagaaggtcgcagtacgaagaggctacggatgtaatcgatatattacttaacactattgaacagaacccagaagaaatcgaccgaactcatatcgagagaatgttcttagatctctttttggctggtacagatacgacatcttcgacggtcgaatgggccatggctgaagccatgaagaacccagaaaccatgaagaaagctaaggcggaattagctcaagttatcggcaaggggaaaatagtccaagaaactgatataccacacctaccatatttgcaatgcatcgtaaaggagacactacgattacacccacctgtacccttccttatcccacgtcgtgttcatgaagacgtggacatattgggttatgtcgttccaaataactcacaagtgttcgttaacatgtgggccattgggagggacccagatatgtggaaaaatccattacaatttgatcccgaccgttttcatgattccgaagtcggtctgagaggtaaagattttgaattgattcccttcggcgctggcagaagaatttgcccaggattacctttggctatgcgtatggtgcctgttgttttaggatctctcttgaactccttcgattggaaggtcgaaggtggtaaagaactggaaatgaatgaaaagtttggaataactcttgaaaaagcacaacctttaatggcagtacccatcgcatta

SEQ ID NO: 1404 - DNA, 3561 bp, Artificial Sequence
  G8H-CPR engineered fusion
atggattctagttcagaaaagttatcaccatttgaattaatgagcgcaattttgaagggagctaagctagatgggtcgaattcgtccgattcaggtgtggcagtttcaccggcagtaatggccatgttgctagagaataaagagctggtcatgattttgactacttccgtggcagtgttgattggttgcgttgttgtgctcatatggagacggtcctccggatctggtaaaaaggttgttgaaccacctaaactaatcgtgccaaaaagtgttgtcgaaccagaggaaatcgatgaaggtaagaaaaagtttactatattttttggcacccagacaggtacggctgagggcttcgcaaaggcactagccgaggaagctaaagctaggtatgaaaaggcagtcattaaggttatcgatatagacgattatgcggctgatgacgaggaatatgaagaaaaatttaggaaggaaacgttagcttttttcattctggctacttacggcgatggtgaaccaacagacaatgcagccagattctacaagtggtttgttgaagggaatgacaggggtgattggttaaaaaatttgcaatacggtgtttttggcctcgggaatcgccagtacgaacatttcaataagatagccaaagtggtagatgagaaggttgcggaacaaggtggcaaacgtatcgtccccttagttttaggcgatgacgatcagtgtattgaagacgatttcgcggcatggcgtgaaaatgtttggcccgaacttgataatcttcttagagacgaagacgatactactgtttcaacaacctacacggccgcaatccccgaatacagagttgttttcccagataagtcagatagcttaatttcagaagcaaatggtcacgctaatggttatgctaatgggaatacggtctacgatgctcaacacccatgcagatctaatgttgcagtccgcaaggagttacacactccagcatcagatcgctcatgtactcatcttgatttcgatatcgctggcaccggattgagctacgggactggagatcatgtaggtgtctattgtgataatttatctgaaaccgtcgaggaagctgagaggttgcttaatctgccgcctgaaacgtattttagcctccacgctgataaggaagacggcacacctttggcaggatcttctttgcctcctccctttccaccttgtacattacggactgctttgactaggtatgcggatttgctgaacacccccaaaaagagcgctttgctggccttagctgcatatgcttccgatcctaatgaagccgatagactaaaatacctagccagtcccgctggcaaggacgagtacgcacaatctcttgtcgctaaccaaagatcgcttttagaggtaatggccgagtttccctctgcaaaaccaccacttggggtttttttcgcggctattgctcctcgtcttcaaccaaggttctattcaatttcctctagtccgcgtatggctcctagtagaatccatgttacatgtgcattagtctacgaaaagactccaggtggtagaattcataagggagtttgttctacttggatgaaaaatgctattccgctggaagaatcacgtgactgctcgtgggcccccatctttgtacgtcaaagtaattttaagcttcctgcagaccctaaggtgccagtgataatgataggtccaggtaccggcttggctcctttcagaggattcttacaggaaaggttagctttgaaggaagaaggcgcagaattgggtactgctgtgttcttctttggttgtcgtaacagaaaaatggactacatttacgaagatgagctaaaccatttcttagaaattggtgccttgtccgaactattagtcgccttcagcagggagggccctacgaagcaatacgttcagcataaaatggctgaaaaagcgtcagacatttggcgaatgataagtgatggtgcctatgtgtatgtgtgcggggatgcaaagggtatggctcgtgatgtccacagaacactacatactatcgcccaagagcaaggctcgatggattctacacaagctgaaggttttgtaaagaatctacaaatgacgggtaggtacctaagagatgtttggggcagtacttcctctggtactaaaaacttacctccaggtccgtcgccactgccatttatcggttctttacatctattgggtgatcaacctcataagtccttggctaaattgtcaaagaaacacggaccgattatgtcgctaaaattaggtcaaatcactaccattgttatatcttcatccaccatggcgaaggaagttttgcagaagcaggatttggccttttcatctagatctgtaccgaatgcgttgcacgcccataaccaatttaaattcagcgttgtatggctaccagtggcatcaaggtggaggtcactcagaaaggtccttaattccaatattttctcgggaaatagattagacgcaaaccaacacttgagaacacggaaagtccaggaattaatagcatactgtagaaaaaactcgcaaagtggtgaagccgtggatgtgggtagagccgcatttagaacttcattaaatctattgtccaatcttattttctcaaaagatctaacggacccatacagcgactctgcaaaagaattcaaggatcttgtttggaacatcatggttgaagcaggcaaacccaacttagtggactttttcccattattagaaaaagttgatccacaaggaatcagacatcgaatgactattcattttggtgaagtgctaaagttatttggtggtttagtcaacgagagactagaacaaaggaggtcaaaaggcgaaaagaacgatgtcctggatgtcttacttactacttcacaggaaagtcctgaagagattgatagaactcacattgaaagaatgtgtttagatttattcgtcgcaggtaccgatacgacaagttctacattagagtgggctatgtcagagatgcttaagaatccagacaaaatgaagaaaactcaagatgaactagctcaagttattggcaggggtaaaaccattgaagaatcagatattaatcgtctaccttatttgaggtgtgtcatgaaggaaactttaagaatacatcctcctgtaccattcctgattccaagaaaggttgagcaatccgttgaagtttgtggttataatgtaccgaaaggttcacaagtattagtcaatgcctgggcaattggcagagacgaaactgtatgggacgatgccttagcattcaagccagaacgctttatggaaagtgaactagatatacgaggcagagactttgagttgattccatttggtgctggccggagaatttgtcctgggttaccgttagctttgcgtacagttccacttatgttgggatccctacttaactcattcaattggaaattggaagggggaatggctcctaaggacttggacatggaggaaaaatttggcatcactttgcaaaaggcacacccacttagagccgtaccatcgactcta

SEQ ID NO: 1405 - DNA, 3555 bp, Artificial Sequence
  G8H-CPR engineered fusion
atggattctagttcagaaaagttatcaccatttgaattaatgagcgcaattttgaagggagctaagctagatgggtcgaattcgtccgattcaggtgtggcagtttcaccggcagtaatggccatgttgctagagaataaagagctggtcatgattttgactacttccgtggcagtgttgattggttgcgttgttgtgctcatatggagacggtcctccggatctggtaaaaaggttgttgaaccacctaaactaatcgtgccaaaaagtgttgtcgaaccagaggaaatcgatgaaggtaagaaaaagtttactatattttttggcacccagacaggtacggctgagggcttcgcaaaggcactagccgaggaagctaaagctaggtatgaaaaggcagtcattaaggttatcgatatagacgattatgcggctgatgacgaggaatatgaagaaaaatttaggaaggaaacgttagcttttttcattctggctacttacggcgatggtgaaccaacagacaatgcagccagattctacaagtggtttgttgaagggaatgacaggggtgattggttaaaaaatttgcaatacggtgtttttggcctcgggaatcgccagtacgaacatttcaataagatagccaaagtggtagatgagaaggttgcggaacaaggtggcaaacgtatcgtccccttagttttaggcgatgacgatcagtgtattgaagacgatttcgcggcatggcgtgaaaatgtttggcccgaacttgataatcttcttagagacgaagacgatactactgtttcaacaacctacacggccgcaatccccgaatacagagttgttttcccagataagtcagatagcttaatttcagaagcaaatggtcacgctaatggttatgctaatgggaatacggtctacgatgctcaacacccatgcagatctaatgttgcagtccgcaaggagttacacactccagcatcagatcgctcatgtactcatcttgatttcgatatcgctggcaccggattgagctacgggactggagatcatgtaggtgtctattgtgataatttatctgaaaccgtcgaggaagctgagaggttgcttaatctgccgcctgaaacgtattttagcctccacgctgataaggaagacggcacacctttggcaggatcttctttgcctcctccctttccaccttgtacattacggactgctttgactaggtatgcggatttgctgaacacccccaaaaagagcgctttgctggccttagctgcatatgcttccgatcctaatgaagccgatagactaaaatacctagccagtcccgctggcaaggacgagtacgcacaatctcttgtcgctaaccaaagatcgcttttagaggtaatggccgagtttccctctgcaaaaccaccacttggggtttttttcgcggctattgctcctcgtcttcaaccaaggttctattcaatttcctctagtccgcgtatggctcctagtagaatccatgttacatgtgcattagtctacgaaaagactccaggtggtagaattcataagggagtttgttctacttggatgaaaaatgctattccgctggaagaatcacgtgactgctcgtgggcccccatctttgtacgtcaaagtaattttaagcttcctgcagaccctaaggtgccagtgataatgataggtccaggtaccggcttggctcctttcagaggattcttacaggaaaggttagctttgaaggaagaaggcgcagaattgggtactgctgtgttcttctttggttgtcgtaacagaaaaatggactacatttacgaagatgagctaaaccatttcttagaaattggtgccttgtccgaactattagtcgccttcagcagggagggccctacgaagcaatacgttcagcataaaatggctgaaaaagcgtcagacatttggcgaatgataagtgatggtgcctatgtgtatgtgtgcggggatgcaaagggtatggctcgtgatgtccacagaacactacatactatcgcccaagagcaaggctcgatggattctacacaagctgaaggttttgtaaagaatctacaaatgacgggtaggtacctaagagatgtttggggcagtacttcctctggtggaaagaatctacccccaggtcccactcctttaccatttattggtaatttacacttgctcggtcatcatccccataagtctttggcacgtcttgccaagacttatggtccattgatgttacttagactagggtctgaaaatactgtggtcgtatcttcggctgccgttgctaaagaagtattgcaaaaacatgatttggcctttagttctcgatccatacctgatgcagttcatgcacacgatcaattcaagtactccgtggtttggttgccagttgcctctagatggagatctttaagaaaaactatgaactccaatatcttttcgggctcctgcttagatgccaatcagcatttaagaagtaggaaggttgaagaattaatcgcctattgtaaagaaagctgtaggcgtgctgaagcagtagacgtcgggcgtgctgctttcagaaccgctttaaattctttgtcaaacacaattttttctcgagaccttgctgatccattatccgactctggtaaggaatttaaggacgttgtttcttcgatcatgatggaggcgggcaagccaaacagtgtagactactatccgttcctgtctcgattcgatccccaaggaatccgtagaaggaccgcaatctattttgataaactgattaacatcttcaagggtttgattgacgaacgtctcgaaaaaagaaggtcgcagtacgaagaggctacggatgtaatcgatatattacttaacactattgaacagaacccagaagaaatcgaccgaactcatatcgagagaatgttcttagatctctttttggctggtacagatacgacatcttcgacggtcgaatgggccatggctgaagccatgaagaacccagaaaccatgaagaaagctaaggcggaattagctcaagttatcggcaaggggaaaatagtccaagaaactgatataccacacctaccatatttgcaatgcatcgtaaaggagacactacgattacacccacctgtacccttccttatcccacgtcgtgttcatgaagacgtggacatattgggttatgtcgttccaaataactcacaagtgttcgttaacatgtgggccattgggagggacccagatatgtggaaaaatccattacaatttgatcccgaccgttttcatgattccgaagtcggtctgagaggtaaagattttgaattgattcccttcggcgctggcagaagaatttgcccaggattacctttggctatgcgtatggtgcctgttgttttaggatctctcttgaactccttcgattggaaggtcgaaggtggtaaagaactggaaatgaatgaaaagtttggaataactcttgaaaaagcacaacctttaatggcagtacccatcgcatta

SEQ ID NO: 1406 - DNA, 3573 bp, Artificial Sequence
  G8H-CPR engineered fusion
atggattctagttcagaaaagttatcaccatttgaattaatgagcgcaattttgaagggagctaagctagatgggtcgaattcgtccgattcaggtgtggcagtttcaccggcagtaatggccatgttgctagagaataaagagctggtcatgattttgactacttccgtggcagtgttgattggttgcgttgttgtgctcatatggagacggtcctccggatctggtaaaaaggttgttgaaccacctaaactaatcgtgccaaaaagtgttgtcgaaccagaggaaatcgatgaaggtaagaaaaagtttactatattttttggcacccagacaggtacggctgagggcttcgcaaaggcactagccgaggaagctaaagctaggtatgaaaaggcagtcattaaggttatcgatatagacgattatgcggctgatgacgaggaatatgaagaaaaatttaggaaggaaacgttagcttttttcattctggctacttacggcgatggtgaaccaacagacaatgcagccagattctacaagtggtttgttgaagggaatgacaggggtgattggttaaaaaatttgcaatacggtgtttttggcctcgggaatcgccagtacgaacatttcaataagatagccaaagtggtagatgagaaggttgcggaacaaggtggcaaacgtatcgtccccttagttttaggcgatgacgatcagtgtattgaagacgatttcgcggcatggcgtgaaaatgtttggcccgaacttgataatcttcttagagacgaagacgatactactgtttcaacaacctacacggccgcaatccccgaatacagagttgttttcccagataagtcagatagcttaatttcagaagcaaatggtcacgctaatggttatgctaatgggaatacggtctacgatgctcaacacccatgcagatctaatgttgcagtccgcaaggagttacacactccagcatcagatcgctcatgtactcatcttgatttcgatatcgctggcaccggattgagctacgggactggagatcatgtaggtgtctattgtgataatttatctgaaaccgtcgaggaagctgagaggttgcttaatctgccgcctgaaacgtattttagcctccacgctgataaggaagacggcacacctttggcaggatcttctttgcctcctccctttccaccttgtacattacggactgctttgactaggtatgcggatttgctgaacacccccaaaaagagcgctttgctggccttagctgcatatgcttccgatcctaatgaagccgatagactaaaatacctagccagtcccgctggcaaggacgagtacgcacaatctcttgtcgctaaccaaagatcgcttttagaggtaatggccgagtttccctctgcaaaaccaccacttggggtttttttcgcggctattgctcctcgtcttcaaccaaggttctattcaatttcctctagtccgcgtatggctcctagtagaatccatgttacatgtgcattagtctacgaaaagactccaggtggtagaattcataagggagtttgttctacttggatgaaaaatgctattccgctggaagaatcacgtgactgctcgtgggcccccatctttgtacgtcaaagtaattttaagcttcctgcagaccctaaggtgccagtgataatgataggtccaggtaccggcttggctcctttcagaggattcttacaggaaaggttagctttgaaggaagaaggcgcagaattgggtactgctgtgttcttctttggttgtcgtaacagaaaaatggactacatttacgaagatgagctaaaccatttcttagaaattggtgccttgtccgaactattagtcgccttcagcagggagggccctacgaagcaatacgttcagcataaaatggctgaaaaagcgtcagacatttggcgaatgataagtgatggtgcctatgtgtatgtgtgcggggatgcaaagggtatggctcgtgatgtccacagaacactacatactatcgcccaagagcaaggctcgatggattctacacaagctgaaggttttgtaaagaatctacaaatgacgggtaggtacctaagagatgtttggggttctacttcctccggttcctcaggcggaactaaaaacttacctccaggtccgtcgccactgccatttatcggttctttacatctattgggtgatcaacctcataagtccttggctaaattgtcaaagaaacacggaccgattatgtcgctaaaattaggtcaaatcactaccattgttatatcttcatccaccatggcgaaggaagttttgcagaagcaggatttggccttttcatctagatctgtaccgaatgcgttgcacgcccataaccaatttaaattcagcgttgtatggctaccagtggcatcaaggtggaggtcactcagaaaggtccttaattccaatattttctcgggaaatagattagacgcaaaccaacacttgagaacacggaaagtccaggaattaatagcatactgtagaaaaaactcgcaaagtggtgaagccgtggatgtgggtagagccgcatttagaacttcattaaatctattgtccaatcttattttctcaaaagatctaacggacccatacagcgactctgcaaaagaattcaaggatcttgtttggaacatcatggttgaagcaggcaaacccaacttagtggactttttcccattattagaaaaagttgatccacaaggaatcagacatcgaatgactattcattttggtgaagtgctaaagttatttggtggtttagtcaacgagagactagaacaaaggaggtcaaaaggcgaaaagaacgatgtcctggatgtcttacttactacttcacaggaaagtcctgaagagattgatagaactcacattgaaagaatgtgtttagatttattcgtcgcaggtaccgatacgacaagttctacattagagtgggctatgtcagagatgcttaagaatccagacaaaatgaagaaaactcaagatgaactagctcaagttattggcaggggtaaaaccattgaagaatcagatattaatcgtctaccttatttgaggtgtgtcatgaaggaaactttaagaatacatcctcctgtaccattcctgattccaagaaaggttgagcaatccgttgaagtttgtggttataatgtaccgaaaggttcacaagtattagtcaatgcctgggcaattggcagagacgaaactgtatgggacgatgccttagcattcaagccagaacgctttatggaaagtgaactagatatacgaggcagagactttgagttgattccatttggtgctggccggagaatttgtcctgggttaccgttagctttgcgtacagttccacttatgttgggatccctacttaactcattcaattggaaattggaagggggaatggctcctaaggacttggacatggaggaaaaatttggcatcactttgcaaaaggcacacccacttagagccgtaccatcgactcta

SEQ ID NO: 1407 - DNA, 3567 bp, Artificial Sequence
  G8H-CPR engineered fusion
atggattctagttcagaaaagttatcaccatttgaattaatgagcgcaattttgaagggagctaagctagatgggtcgaattcgtccgattcaggtgtggcagtttcaccggcagtaatggccatgttgctagagaataaagagctggtcatgattttgactacttccgtggcagtgttgattggttgcgttgttgtgctcatatggagacggtcctccggatctggtaaaaaggttgttgaaccacctaaactaatcgtgccaaaaagtgttgtcgaaccagaggaaatcgatgaaggtaagaaaaagtttactatattttttggcacccagacaggtacggctgagggcttcgcaaaggcactagccgaggaagctaaagctaggtatgaaaaggcagtcattaaggttatcgatatagacgattatgcggctgatgacgaggaatatgaagaaaaatttaggaaggaaacgttagcttttttcattctggctacttacggcgatggtgaaccaacagacaatgcagccagattctacaagtggtttgttgaagggaatgacaggggtgattggttaaaaaatttgcaatacggtgtttttggcctcgggaatcgccagtacgaacatttcaataagatagccaaagtggtagatgagaaggttgcggaacaaggtggcaaacgtatcgtccccttagttttaggcgatgacgatcagtgtattgaagacgatttcgcggcatggcgtgaaaatgtttggcccgaacttgataatcttcttagagacgaagacgatactactgtttcaacaacctacacggccgcaatccccgaatacagagttgttttcccagataagtcagatagcttaatttcagaagcaaatggtcacgctaatggttatgctaatgggaatacggtctacgatgctcaacacccatgcagatctaatgttgcagtccgcaaggagttacacactccagcatcagatcgctcatgtactcatcttgatttcgatatcgctggcaccggattgagctacgggactggagatcatgtaggtgtctattgtgataatttatctgaaaccgtcgaggaagctgagaggttgcttaatctgccgcctgaaacgtattttagcctccacgctgataaggaagacggcacacctttggcaggatcttctttgcctcctccctttccaccttgtacattacggactgctttgactaggtatgcggatttgctgaacacccccaaaaagagcgctttgctggccttagctgcatatgcttccgatcctaatgaagccgatagactaaaatacctagccagtcccgctggcaaggacgagtacgcacaatctcttgtcgctaaccaaagatcgcttttagaggtaatggccgagtttccctctgcaaaaccaccacttggggtttttttcgcggctattgctcctcgtcttcaaccaaggttctattcaatttcctctagtccgcgtatggctcctagtagaatccatgttacatgtgcattagtctacgaaaagactccaggtggtagaattcataagggagtttgttctacttggatgaaaaatgctattccgctggaagaatcacgtgactgctcgtgggcccccatctttgtacgtcaaagtaattttaagcttcctgcagaccctaaggtgccagtgataatgataggtccaggtaccggcttggctcctttcagaggattcttacaggaaaggttagctttgaaggaagaaggcgcagaattgggtactgctgtgttcttctttggttgtcgtaacagaaaaatggactacatttacgaagatgagctaaaccatttcttagaaattggtgccttgtccgaactattagtcgccttcagcagggagggccctacgaagcaatacgttcagcataaaatggctgaaaaagcgtcagacatttggcgaatgataagtgatggtgcctatgtgtatgtgtgcggggatgcaaagggtatggctcgtgatgtccacagaacactacatactatcgcccaagagcaaggctcgatggattctacacaagctgaaggttttgtaaagaatctacaaatgacgggtaggtacctaagagatgtttggggttctacttcctccggttcctcaggcggaggaaagaatctacccccaggtcccactcctttaccatttattggtaatttacacttgctcggtcatcatccccataagtctttggcacgtcttgccaagacttatggtccattgatgttacttagactagggtctgaaaatactgtggtcgtatcttcggctgccgttgctaaagaagtattgcaaaaacatgatttggcctttagttctcgatccatacctgatgcagttcatgcacacgatcaattcaagtactccgtggtttggttgccagttgcctctagatggagatctttaagaaaaactatgaactccaatatcttttcgggctcctgcttagatgccaatcagcatttaagaagtaggaaggttgaagaattaatcgcctattgtaaagaaagctgtaggcgtgctgaagcagtagacgtcgggcgtgctgctttcagaaccgctttaaattctttgtcaaacacaattttttctcgagaccttgctgatccattatccgactctggtaaggaatttaaggacgttgtttcttcgatcatgatggaggcgggcaagccaaacagtgtagactactatccgttcctgtctcgattcgatccccaaggaatccgtagaaggaccgcaatctattttgataaactgattaacatcttcaagggtttgattgacgaacgtctcgaaaaaagaaggtcgcagtacgaagaggctacggatgtaatcgatatattacttaacactattgaacagaacccagaagaaatcgaccgaactcatatcgagagaatgttcttagatctctttttggctggtacagatacgacatcttcgacggtcgaatgggccatggctgaagccatgaagaacccagaaaccatgaagaaagctaaggcggaattagctcaagttatcggcaaggggaaaatagtccaagaaactgatataccacacctaccatatttgcaatgcatcgtaaaggagacactacgattacacccacctgtacccttccttatcccacgtcgtgttcatgaagacgtggacatattgggttatgtcgttccaaataactcacaagtgttcgttaacatgtgggccattgggagggacccagatatgtggaaaaatccattacaatttgatcccgaccgttttcatgattccgaagtcggtctgagaggtaaagattttgaattgattcccttcggcgctggcagaagaatttgcccaggattacctttggctatgcgtatggtgcctgttgttttaggatctctcttgaactccttcgattggaaggtcgaaggtggtaaagaactggaaatgaatgaaaagtttggaataactcttgaaaaagcacaacctttaatggcagtacccatcgcatta

SEQ ID NO: 1408 - DNA, 3588 bp, Artificial Sequence
  G8H-CPR engineered fusion
atggattctagttcagaaaagttatcaccatttgaattaatgagcgcaattttgaagggagctaagctagatgggtcgaattcgtccgattcaggtgtggcagtttcaccggcagtaatggccatgttgctagagaataaagagctggtcatgattttgactacttccgtggcagtgttgattggttgcgttgttgtgctcatatggagacggtcctccggatctggtaaaaaggttgttgaaccacctaaactaatcgtgccaaaaagtgttgtcgaaccagaggaaatcgatgaaggtaagaaaaagtttactatattttttggcacccagacaggtacggctgagggcttcgcaaaggcactagccgaggaagctaaagctaggtatgaaaaggcagtcattaaggttatcgatatagacgattatgcggctgatgacgaggaatatgaagaaaaatttaggaaggaaacgttagcttttttcattctggctacttacggcgatggtgaaccaacagacaatgcagccagattctacaagtggtttgttgaagggaatgacaggggtgattggttaaaaaatttgcaatacggtgtttttggcctcgggaatcgccagtacgaacatttcaataagatagccaaagtggtagatgagaaggttgcggaacaaggtggcaaacgtatcgtccccttagttttaggcgatgacgatcagtgtattgaagacgatttcgcggcatggcgtgaaaatgtttggcccgaacttgataatcttcttagagacgaagacgatactactgtttcaacaacctacacggccgcaatccccgaatacagagttgttttcccagataagtcagatagcttaatttcagaagcaaatggtcacgctaatggttatgctaatgggaatacggtctacgatgctcaacacccatgcagatctaatgttgcagtccgcaaggagttacacactccagcatcagatcgctcatgtactcatcttgatttcgatatcgctggcaccggattgagctacgggactggagatcatgtaggtgtctattgtgataatttatctgaaaccgtcgaggaagctgagaggttgcttaatctgccgcctgaaacgtattttagcctccacgctgataaggaagacggcacacctttggcaggatcttctttgcctcctccctttccaccttgtacattacggactgctttgactaggtatgcggatttgctgaacacccccaaaaagagcgctttgctggccttagctgcatatgcttccgatcctaatgaagccgatagactaaaatacctagccagtcccgctggcaaggacgagtacgcacaatctcttgtcgctaaccaaagatcgcttttagaggtaatggccgagtttccctctgcaaaaccaccacttggggtttttttcgcggctattgctcctcgtcttcaaccaaggttctattcaatttcctctagtccgcgtatggctcctagtagaatccatgttacatgtgcattagtctacgaaaagactccaggtggtagaattcataagggagtttgttctacttggatgaaaaatgctattccgctggaagaatcacgtgactgctcgtgggcccccatctttgtacgtcaaagtaattttaagcttcctgcagaccctaaggtgccagtgataatgataggtccaggtaccggcttggctcctttcagaggattcttacaggaaaggttagctttgaaggaagaaggcgcagaattgggtactgctgtgttcttctttggttgtcgtaacagaaaaatggactacatttacgaagatgagctaaaccatttcttagaaattggtgccttgtccgaactattagtcgccttcagcagggagggccctacgaagcaatacgttcagcataaaatggctgaaaaagcgtcagacatttggcgaatgataagtgatggtgcctatgtgtatgtgtgcggggatgcaaagggtatggctcgtgatgtccacagaacactacatactatcgcccaagagcaaggctcgatggattctacacaagctgaaggttttgtaaagaatctacaaatgacgggtaggtacctaagagatgtttggggtggcggctctggcggaagcacatctagcggtagttccggtggtactaaaaacttacctccaggtccgtcgccactgccatttatcggttctttacatctattgggtgatcaacctcataagtccttggctaaattgtcaaagaaacacggaccgattatgtcgctaaaattaggtcaaatcactaccattgttatatcttcatccaccatggcgaaggaagttttgcagaagcaggatttggccttttcatctagatctgtaccgaatgcgttgcacgcccataaccaatttaaattcagcgttgtatggctaccagtggcatcaaggtggaggtcactcagaaaggtccttaattccaatattttctcgggaaatagattagacgcaaaccaacacttgagaacacggaaagtccaggaattaatagcatactgtagaaaaaactcgcaaagtggtgaagccgtggatgtgggtagagccgcatttagaacttcattaaatctattgtccaatcttattttctcaaaagatctaacggacccatacagcgactctgcaaaagaattcaaggatcttgtttggaacatcatggttgaagcaggcaaacccaacttagtggactttttcccattattagaaaaagttgatccacaaggaatcagacatcgaatgactattcattttggtgaagtgctaaagttatttggtggtttagtcaacgagagactagaacaaaggaggtcaaaaggcgaaaagaacgatgtcctggatgtcttacttactacttcacaggaaagtcctgaagagattgatagaactcacattgaaagaatgtgtttagatttattcgtcgcaggtaccgatacgacaagttctacattagagtgggctatgtcagagatgcttaagaatccagacaaaatgaagaaaactcaagatgaactagctcaagttattggcaggggtaaaaccattgaagaatcagatattaatcgtctaccttatttgaggtgtgtcatgaaggaaactttaagaatacatcctcctgtaccattcctgattccaagaaaggttgagcaatccgttgaagtttgtggttataatgtaccgaaaggttcacaagtattagtcaatgcctgggcaattggcagagacgaaactgtatgggacgatgccttagcattcaagccagaacgctttatggaaagtgaactagatatacgaggcagagactttgagttgattccatttggtgctggccggagaatttgtcctgggttaccgttagctttgcgtacagttccacttatgttgggatccctacttaactcattcaattggaaattggaagggggaatggctcctaaggacttggacatggaggaaaaatttggcatcactttgcaaaaggcacacccacttagagccgtaccatcgactcta

SEQ ID NO: 1409 - DNA, 3582 bp, Artificial Sequence
  G8H-CPR engineered fusion
atggattctagttcagaaaagttatcaccatttgaattaatgagcgcaattttgaagggagctaagctagatgggtcgaattcgtccgattcaggtgtggcagtttcaccggcagtaatggccatgttgctagagaataaagagctggtcatgattttgactacttccgtggcagtgttgattggttgcgttgttgtgctcatatggagacggtcctccggatctggtaaaaaggttgttgaaccacctaaactaatcgtgccaaaaagtgttgtcgaaccagaggaaatcgatgaaggtaagaaaaagtttactatattttttggcacccagacaggtacggctgagggcttcgcaaaggcactagccgaggaagctaaagctaggtatgaaaaggcagtcattaaggttatcgatatagacgattatgcggctgatgacgaggaatatgaagaaaaatttaggaaggaaacgttagcttttttcattctggctacttacggcgatggtgaaccaacagacaatgcagccagattctacaagtggtttgttgaagggaatgacaggggtgattggttaaaaaatttgcaatacggtgtttttggcctcgggaatcgccagtacgaacatttcaataagatagccaaagtggtagatgagaaggttgcggaacaaggtggcaaacgtatcgtccccttagttttaggcgatgacgatcagtgtattgaagacgatttcgcggcatggcgtgaaaatgtttggcccgaacttgataatcttcttagagacgaagacgatactactgtttcaacaacctacacggccgcaatccccgaatacagagttgttttcccagataagtcagatagcttaatttcagaagcaaatggtcacgctaatggttatgctaatgggaatacggtctacgatgctcaacacccatgcagatctaatgttgcagtccgcaaggagttacacactccagcatcagatcgctcatgtactcatcttgatttcgatatcgctggcaccggattgagctacgggactggagatcatgtaggtgtctattgtgataatttatctgaaaccgtcgaggaagctgagaggttgcttaatctgccgcctgaaacgtattttagcctccacgctgataaggaagacggcacacctttggcaggatcttctttgcctcctccctttccaccttgtacattacggactgctttgactaggtatgcggatttgctgaacacccccaaaaagagcgctttgctggccttagctgcatatgcttccgatcctaatgaagccgatagactaaaatacctagccagtcccgctggcaaggacgagtacgcacaatctcttgtcgctaaccaaagatcgcttttagaggtaatggccgagtttccctctgcaaaaccaccacttggggtttttttcgcggctattgctcctcgtcttcaaccaaggttctattcaatttcctctagtccgcgtatggctcctagtagaatccatgttacatgtgcattagtctacgaaaagactccaggtggtagaattcataagggagtttgttctacttggatgaaaaatgctattccgctggaagaatcacgtgactgctcgtgggcccccatctttgtacgtcaaagtaattttaagcttcctgcagaccctaaggtgccagtgataatgataggtccaggtaccggcttggctcctttcagaggattcttacaggaaaggttagctttgaaggaagaaggcgcagaattgggtactgctgtgttcttctttggttgtcgtaacagaaaaatggactacatttacgaagatgagctaaaccatttcttagaaattggtgccttgtccgaactattagtcgccttcagcagggagggccctacgaagcaatacgttcagcataaaatggctgaaaaagcgtcagacatttggcgaatgataagtgatggtgcctatgtgtatgtgtgcggggatgcaaagggtatggctcgtgatgtccacagaacactacatactatcgcccaagagcaaggctcgatggattctacacaagctgaaggttttgtaaagaatctacaaatgacgggtaggtacctaagagatgtttggggtggcggctctggcggaagcacatctagcggtagttccggtggtggaaagaatctacccccaggtcccactcctttaccatttattggtaatttacacttgctcggtcatcatccccataagtctttggcacgtcttgccaagacttatggtccattgatgttacttagactagggtctgaaaatactgtggtcgtatcttcggctgccgttgctaaagaagtattgcaaaaacatgatttggcctttagttctcgatccatacctgatgcagttcatgcacacgatcaattcaagtactccgtggtttggttgccagttgcctctagatggagatctttaagaaaaactatgaactccaatatcttttcgggctcctgcttagatgccaatcagcatttaagaagtaggaaggttgaagaattaatcgcctattgtaaagaaagctgtaggcgtgctgaagcagtagacgtcgggcgtgctgctttcagaaccgctttaaattctttgtcaaacacaattttttctcgagaccttgctgatccattatccgactctggtaaggaatttaaggacgttgtttcttcgatcatgatggaggcgggcaagccaaacagtgtagactactatccgttcctgtctcgattcgatccccaaggaatccgtagaaggaccgcaatctattttgataaactgattaacatcttcaagggtttgattgacgaacgtctcgaaaaaagaaggtcgcagtacgaagaggctacggatgtaatcgatatattacttaacactattgaacagaacccagaagaaatcgaccgaactcatatcgagagaatgttcttagatctctttttggctggtacagatacgacatcttcgacggtcgaatgggccatggctgaagccatgaagaacccagaaaccatgaagaaagctaaggcggaattagctcaagttatcggcaaggggaaaatagtccaagaaactgatataccacacctaccatatttgcaatgcatcgtaaaggagacactacgattacacccacctgtacccttccttatcccacgtcgtgttcatgaagacgtggacatattgggttatgtcgttccaaataactcacaagtgttcgttaacatgtgggccattgggagggacccagatatgtggaaaaatccattacaatttgatcccgaccgttttcatgattccgaagtcggtctgagaggtaaagattttgaattgattcccttcggcgctggcagaagaatttgcccaggattacctttggctatgcgtatggtgcctgttgttttaggatctctcttgaactccttcgattggaaggtcgaaggtggtaaagaactggaaatgaatgaaaagtttggaataactcttgaaaaagcacaacctttaatggcagtacccatcgcatta

SEQ ID NO: 1410 - DNA, 3423 bp, Artificial Sequence
  G8H-CPR engineered fusion
atggattacctgactataatacttacacttctcttcgctctaactctttacgaagctttttcttatttatcacgaagaactaaaaacttacctccaggtccgtcgccactgccatttatcggttctttacatctattgggtgatcaacctcataagtccttggctaaattgtcaaagaaacacggaccgattatgtcgctaaaattaggtcaaatcactaccattgttatatcttcatccaccatggcgaaggaagttttgcagaagcaggatttggccttttcatctagatctgtaccgaatgcgttgcacgcccataaccaatttaaattcagcgttgtatggctaccagtggcatcaaggtggaggtcactcagaaaggtccttaattccaatattttctcgggaaatagattagacgcaaaccaacacttgagaacacggaaagtccaggaattaatagcatactgtagaaaaaactcgcaaagtggtgaagccgtggatgtgggtagagccgcatttagaacttcattaaatctattgtccaatcttattttctcaaaagatctaacggacccatacagcgactctgcaaaagaattcaaggatcttgtttggaacatcatggttgaagcaggcaaacccaacttagtggactttttcccattattagaaaaagttgatccacaaggaatcagacatcgaatgactattcattttggtgaagtgctaaagttatttggtggtttagtcaacgagagactagaacaaaggaggtcaaaaggcgaaaagaacgatgtcctggatgtcttacttactacttcacaggaaagtcctgaagagattgatagaactcacattgaaagaatgtgtttagatttattcgtcgcaggtaccgatacgacaagttctacattagagtgggctatgtcagagatgcttaagaatccagacaaaatgaagaaaactcaagatgaactagctcaagttattggcaggggtaaaaccattgaagaatcagatattaatcgtctaccttatttgaggtgtgtcatgaaggaaactttaagaatacatcctcctgtaccattcctgattccaagaaaggttgagcaatccgttgaagtttgtggttataatgtaccgaaaggttcacaagtattagtcaatgcctgggcaattggcagagacgaaactgtatgggacgatgccttagcattcaagccagaacgctttatggaaagtgaactagatatacgaggcagagactttgagttgattccatttggtgctggccggagaatttgtcctgggttaccgttagctttgcgtacagttccacttatgttgggatccctacttaactcattcaattggaaattggaagggggaatggctcctaaggacttggacatggaggaaaaatttggcatcactttgcaaaaggcacacccacttagagccgtaccatcgactctaggcagtacttcctctggttggaaaaaaacgactgcagacagatcaggtgagttgaaaccactgatgattccaaaatctctgatggctaaagacgaagatgatgacttggatcttggctctggcaagacaagagtttctatcttttttggtacacaaactggtacggctgaagggttcgccaaagccttaagtgaagaaattaaagcaaggtatgaaaaggcggccgtgaaagatgactacgctgcagatgatgaccaatacgaagaaaagctcaaaaaagagactcttgcttttttctgcgttgctacgtacggtgatggagaaccaacagacaacgccgcgagattttataaatggtttactgaagaaaatgaaagagacattaagcttcagcagctagcatacggagttttcgctctcggtaatagacagtatgaacattttaacaagattggaatagtcctagatgaggaattgtgcaaaaaaggagctaagagactgattgaagttggattgggtgatgatgatcagtcaattgaagatgattttaatgcgtggaaagagtcgttgtggagcgaattagataagctactgaaggatgaagatgataaatctgtggctacaccctacaccgccgttatcccagagtacagggtagttacccatgatcctagatttacaactcaaaaatccatggagagtaatgtggcaaacggaaataccactatcgatatccatcatccctgtcgtgtagacgttgctgtgcagaaagagttacacactcatgaatctgatagatcttgtattcacttggagttcgacatttcgagaacaggtataacatacgaaactggggatcacgtcggtgtttatgccgaaaatcatgttgagatcgttgaagaagccggtaaacttttgggtcacagtttggaccttgttttttcaattcacgccgataaagaggacggctcacctttagaatctgcagtgccccccccctttccggggccatgtacgcttggcacaggtctagcgagatacgcagatcttctcaatccacctagaaagtcagctctcgttgcattagcagcttatgcaactgaaccgtctgaggccgagaagttgaagcacttgacctctccggatggtaaagatgagtatagtcagtggattgtagcatctcagagaagtttattggaggtcatggctgcttttccaagcgctaagcctcctctaggtgtctttttcgctgctatcgctcctaggctacagccgagatattacagcatatcatcctctccaagattggctccatcgcgcgtacacgtgacttccgctctggtatatggaccaaccccaaccggtagaattcacaaaggtgtctgctcaacatggatgaaaaacgcagtgccagccgagaagtcacatgagtgtagtggtgctccaatattcataagagcctctaatttcaaacttccaagcaatccgtctacaccaatcgtcatggttggtcccggaacaggtttggctccatttaggggatttctacaagagaggatggcattaaaagaagatggtgaagaattagggagctcgttgttatttttcggatgccgaaatcgtcaaatggacttcatttacgaagatgaattgaacaactttgttgaccaaggtgttatttcagagctaataatggcgttcagtagagaaggagcacaaaaagaatacgtccaacataaaatgatggaaaaagctgcccaagtttgggatttgattaaagaagaaggttatttatatgtgtgtggagatgctaaaggtatggcaagagatgttcataggacacttcatactatagttcaggaacaagaaggcgtatcgagtagcgaggcggaggctatagttaaaaaattgcaaacagagggtcgttacctgagagatgtgtgg

SEQ ID NO: 1411 - DNA, 3435 bp, Artificial Sequence
  G8H-CPR engineered fusion
atggattacctgactataatacttacacttctcttcgctctaactctttacgaagctttttcttatttatcacgaagaactaaaaacttacctccaggtccgtcgccactgccatttatcggttctttacatctattgggtgatcaacctcataagtccttggctaaattgtcaaagaaacacggaccgattatgtcgctaaaattaggtcaaatcactaccattgttatatcttcatccaccatggcgaaggaagttttgcagaagcaggatttggccttttcatctagatctgtaccgaatgcgttgcacgcccataaccaatttaaattcagcgttgtatggctaccagtggcatcaaggtggaggtcactcagaaaggtccttaattccaatattttctcgggaaatagattagacgcaaaccaacacttgagaacacggaaagtccaggaattaatagcatactgtagaaaaaactcgcaaagtggtgaagccgtggatgtgggtagagccgcatttagaacttcattaaatctattgtccaatcttattttctcaaaagatctaacggacccatacagcgactctgcaaaagaattcaaggatcttgtttggaacatcatggttgaagcaggcaaacccaacttagtggactttttcccattattagaaaaagttgatccacaaggaatcagacatcgaatgactattcattttggtgaagtgctaaagttatttggtggtttagtcaacgagagactagaacaaaggaggtcaaaaggcgaaaagaacgatgtcctggatgtcttacttactacttcacaggaaagtcctgaagagattgatagaactcacattgaaagaatgtgtttagatttattcgtcgcaggtaccgatacgacaagttctacattagagtgggctatgtcagagatgcttaagaatccagacaaaatgaagaaaactcaagatgaactagctcaagttattggcaggggtaaaaccattgaagaatcagatattaatcgtctaccttatttgaggtgtgtcatgaaggaaactttaagaatacatcctcctgtaccattcctgattccaagaaaggttgagcaatccgttgaagtttgtggttataatgtaccgaaaggttcacaagtattagtcaatgcctgggcaattggcagagacgaaactgtatgggacgatgccttagcattcaagccagaacgctttatggaaagtgaactagatatacgaggcagagactttgagttgattccatttggtgctggccggagaatttgtcctgggttaccgttagctttgcgtacagttccacttatgttgggatccctacttaactcattcaattggaaattggaagggggaatggctcctaaggacttggacatggaggaaaaatttggcatcactttgcaaaaggcacacccacttagagccgtaccatcgactctaggcagtacttcctctggttggagacggtcctccggatctggtaaaaaggttgttgaaccacctaaactaatcgtgccaaaaagtgttgtcgaaccagaggaaatcgatgaaggtaagaaaaagtttactatattttttggcacccagacaggtacggctgagggcttcgcaaaggcactagccgaggaagctaaagctaggtatgaaaaggcagtcattaaggttatcgatatagacgattatgcggctgatgacgaggaatatgaagaaaaatttaggaaggaaacgttagcttttttcattctggctacttacggcgatggtgaaccaacagacaatgcagccagattctacaagtggtttgttgaagggaatgacaggggtgattggttaaaaaatttgcaatacggtgtttttggcctcgggaatcgccagtacgaacatttcaataagatagccaaagtggtagatgagaaggttgcggaacaaggtggcaaacgtatcgtccccttagttttaggcgatgacgatcagtgtattgaagacgatttcgcggcatggcgtgaaaatgtttggcccgaacttgataatcttcttagagacgaagacgatactactgtttcaacaacctacacggccgcaatccccgaatacagagttgttttcccagataagtcagatagcttaatttcagaagcaaatggtcacgctaatggttatgctaatgggaatacggtctacgatgctcaacacccatgcagatctaatgttgcagtccgcaaggagttacacactccagcatcagatcgctcatgtactcatcttgatttcgatatcgctggcaccggattgagctacgggactggagatcatgtaggtgtctattgtgataatttatctgaaaccgtcgaggaagctgagaggttgcttaatctgccgcctgaaacgtattttagcctccacgctgataaggaagacggcacacctttggcaggatcttctttgcctcctccctttccaccttgtacattacggactgctttgactaggtatgcggatttgctgaacacccccaaaaagagcgctttgctggccttagctgcatatgcttccgatcctaatgaagccgatagactaaaatacctagccagtcccgctggcaaggacgagtacgcacaatctcttgtcgctaaccaaagatcgcttttagaggtaatggccgagtttccctctgcaaaaccaccacttggggtttttttcgcggctattgctcctcgtcttcaaccaaggttctattcaatttcctctagtccgcgtatggctcctagtagaatccatgttacatgtgcattagtctacgaaaagactccaggtggtagaattcataagggagtttgttctacttggatgaaaaatgctattccgctggaagaatcacgtgactgctcgtgggcccccatctttgtacgtcaaagtaattttaagcttcctgcagaccctaaggtgccagtgataatgataggtccaggtaccggcttggctcctttcagaggattcttacaggaaaggttagctttgaaggaagaaggcgcagaattgggtactgctgtgttcttctttggttgtcgtaacagaaaaatggactacatttacgaagatgagctaaaccatttcttagaaattggtgccttgtccgaactattagtcgccttcagcagggagggccctacgaagcaatacgttcagcataaaatggctgaaaaagcgtcagacatttggcgaatgataagtgatggtgcctatgtgtatgtgtgcggggatgcaaagggtatggctcgtgatgtccacagaacactacatactatcgcccaagagcaaggctcgatggattctacacaagctgaaggttttgtaaagaatctacaaatgacgggtaggtacctaagagatgtttgg

SEQ ID NO: 1412 - DNA, 3435 bp, Artificial Sequence
  G8H-CPR engineered fusion
atggattacctgactataatacttacacttctcttcgctctaactctttacgaagctttttcttatttatcacgaagaactaaaaacttacctccaggtccgtcgccactgccatttatcggttctttacatctattgggtgatcaacctcataagtccttggctaaattgtcaaagaaacacggaccgattatgtcgctaaaattaggtcaaatcactaccattgttatatcttcatccaccatggcgaaggaagttttgcagaagcaggatttggccttttcatctagatctgtaccgaatgcgttgcacgcccataaccaatttaaattcagcgttgtatggctaccagtggcatcaaggtggaggtcactcagaaaggtccttaattccaatattttctcgggaaatagattagacgcaaaccaacacttgagaacacggaaagtccaggaattaatagcatactgtagaaaaaactcgcaaagtggtgaagccgtggatgtgggtagagccgcatttagaacttcattaaatctattgtccaatcttattttctcaaaagatctaacggacccatacagcgactctgcaaaagaattcaaggatcttgtttggaacatcatggttgaagcaggcaaacccaacttagtggactttttcccattattagaaaaagttgatccacaaggaatcagacatcgaatgactattcattttggtgaagtgctaaagttatttggtggtttagtcaacgagagactagaacaaaggaggtcaaaaggcgaaaagaacgatgtcctggatgtcttacttactacttcacaggaaagtcctgaagagattgatagaactcacattgaaagaatgtgtttagatttattcgtcgcaggtaccgatacgacaagttctacattagagtgggctatgtcagagatgcttaagaatccagacaaaatgaagaaaactcaagatgaactagctcaagttattggcaggggtaaaaccattgaagaatcagatattaatcgtctaccttatttgaggtgtgtcatgaaggaaactttaagaatacatcctcctgtaccattcctgattccaagaaaggttgagcaatccgttgaagtttgtggttataatgtaccgaaaggttcacaagtattagtcaatgcctgggcaattggcagagacgaaactgtatgggacgatgccttagcattcaagccagaacgctttatggaaagtgaactagatatacgaggcagagactttgagttgattccatttggtgctggccggagaatttgtcctgggttaccgttagctttgcgtacagttccacttatgttgggatccctacttaactcattcaattggaaattggaagggggaatggctcctaaggacttggacatggaggaaaaatttggcatcactttgcaaaaggcacacccacttagagccgtaccatcgactctaggttctacttcctccggttcctcaggcggatggaaaaaaacgactgcagacagatcaggtgagttgaaaccactgatgattccaaaatctctgatggctaaagacgaagatgatgacttggatcttggctctggcaagacaagagtttctatcttttttggtacacaaactggtacggctgaagggttcgccaaagccttaagtgaagaaattaaagcaaggtatgaaaaggcggccgtgaaagatgactacgctgcagatgatgaccaatacgaagaaaagctcaaaaaagagactcttgcttttttctgcgttgctacgtacggtgatggagaaccaacagacaacgccgcgagattttataaatggtttactgaagaaaatgaaagagacattaagcttcagcagctagcatacggagttttcgctctcggtaatagacagtatgaacattttaacaagattggaatagtcctagatgaggaattgtgcaaaaaaggagctaagagactgattgaagttggattgggtgatgatgatcagtcaattgaagatgattttaatgcgtggaaagagtcgttgtggagcgaattagataagctactgaaggatgaagatgataaatctgtggctacaccctacaccgccgttatcccagagtacagggtagttacccatgatcctagatttacaactcaaaaatccatggagagtaatgtggcaaacggaaataccactatcgatatccatcatccctgtcgtgtagacgttgctgtgcagaaagagttacacactcatgaatctgatagatcttgtattcacttggagttcgacatttcgagaacaggtataacatacgaaactggggatcacgtcggtgtttatgccgaaaatcatgttgagatcgttgaagaagccggtaaacttttgggtcacagtttggaccttgttttttcaattcacgccgataaagaggacggctcacctttagaatctgcagtgccccccccctttccggggccatgtacgcttggcacaggtctagcgagatacgcagatcttctcaatccacctagaaagtcagctctcgttgcattagcagcttatgcaactgaaccgtctgaggccgagaagttgaagcacttgacctctccggatggtaaagatgagtatagtcagtggattgtagcatctcagagaagtttattggaggtcatggctgcttttccaagcgctaagcctcctctaggtgtctttttcgctgctatcgctcctaggctacagccgagatattacagcatatcatcctctccaagattggctccatcgcgcgtacacgtgacttccgctctggtatatggaccaaccccaaccggtagaattcacaaaggtgtctgctcaacatggatgaaaaacgcagtgccagccgagaagtcacatgagtgtagtggtgctccaatattcataagagcctctaatttcaaacttccaagcaatccgtctacaccaatcgtcatggttggtcccggaacaggtttggctccatttaggggatttctacaagagaggatggcattaaaagaagatggtgaagaattagggagctcgttgttatttttcggatgccgaaatcgtcaaatggacttcatttacgaagatgaattgaacaactttgttgaccaaggtgttatttcagagctaataatggcgttcagtagagaaggagcacaaaaagaatacgtccaacataaaatgatggaaaaagctgcccaagtttgggatttgattaaagaagaaggttatttatatgtgtgtggagatgctaaaggtatggcaagagatgttcataggacacttcatactatagttcaggaacaagaaggcgtatcgagtagcgaggcggaggctatagttaaaaaattgcaaacagagggtcgttacctgagagatgtgtgg

SEQ ID NO: 1413 - DNA, 3447 bp, Artificial Sequence
  G8H-CPR engineered fusion
atggattacctgactataatacttacacttctcttcgctctaactctttacgaagctttttcttatttatcacgaagaactaaaaacttacctccaggtccgtcgccactgccatttatcggttctttacatctattgggtgatcaacctcataagtccttggctaaattgtcaaagaaacacggaccgattatgtcgctaaaattaggtcaaatcactaccattgttatatcttcatccaccatggcgaaggaagttttgcagaagcaggatttggccttttcatctagatctgtaccgaatgcgttgcacgcccataaccaatttaaattcagcgttgtatggctaccagtggcatcaaggtggaggtcactcagaaaggtccttaattccaatattttctcgggaaatagattagacgcaaaccaacacttgagaacacggaaagtccaggaattaatagcatactgtagaaaaaactcgcaaagtggtgaagccgtggatgtgggtagagccgcatttagaacttcattaaatctattgtccaatcttattttctcaaaagatctaacggacccatacagcgactctgcaaaagaattcaaggatcttgtttggaacatcatggttgaagcaggcaaacccaacttagtggactttttcccattattagaaaaagttgatccacaaggaatcagacatcgaatgactattcattttggtgaagtgctaaagttatttggtggtttagtcaacgagagactagaacaaaggaggtcaaaaggcgaaaagaacgatgtcctggatgtcttacttactacttcacaggaaagtcctgaagagattgatagaactcacattgaaagaatgtgtttagatttattcgtcgcaggtaccgatacgacaagttctacattagagtgggctatgtcagagatgcttaagaatccagacaaaatgaagaaaactcaagatgaactagctcaagttattggcaggggtaaaaccattgaagaatcagatattaatcgtctaccttatttgaggtgtgtcatgaaggaaactttaagaatacatcctcctgtaccattcctgattccaagaaaggttgagcaatccgttgaagtttgtggttataatgtaccgaaaggttcacaagtattagtcaatgcctgggcaattggcagagacgaaactgtatgggacgatgccttagcattcaagccagaacgctttatggaaagtgaactagatatacgaggcagagactttgagttgattccatttggtgctggccggagaatttgtcctgggttaccgttagctttgcgtacagttccacttatgttgggatccctacttaactcattcaattggaaattggaagggggaatggctcctaaggacttggacatggaggaaaaatttggcatcactttgcaaaaggcacacccacttagagccgtaccatcgactctaggttctacttcctccggttcctcaggcggatggagacggtcctccggatctggtaaaaaggttgttgaaccacctaaactaatcgtgccaaaaagtgttgtcgaaccagaggaaatcgatgaaggtaagaaaaagtttactatattttttggcacccagacaggtacggctgagggcttcgcaaaggcactagccgaggaagctaaagctaggtatgaaaaggcagtcattaaggttatcgatatagacgattatgcggctgatgacgaggaatatgaagaaaaatttaggaaggaaacgttagcttttttcattctggctacttacggcgatggtgaaccaacagacaatgcagccagattctacaagtggtttgttgaagggaatgacaggggtgattggttaaaaaatttgcaatacggtgtttttggcctcgggaatcgccagtacgaacatttcaataagatagccaaagtggtagatgagaaggttgcggaacaaggtggcaaacgtatcgtccccttagttttaggcgatgacgatcagtgtattgaagacgatttcgcggcatggcgtgaaaatgtttggcccgaacttgataatcttcttagagacgaagacgatactactgtttcaacaacctacacggccgcaatccccgaatacagagttgttttcccagataagtcagatagcttaatttcagaagcaaatggtcacgctaatggttatgctaatgggaatacggtctacgatgctcaacacccatgcagatctaatgttgcagtccgcaaggagttacacactccagcatcagatcgctcatgtactcatcttgatttcgatatcgctggcaccggattgagctacgggactggagatcatgtaggtgtctattgtgataatttatctgaaaccgtcgaggaagctgagaggttgcttaatctgccgcctgaaacgtattttagcctccacgctgataaggaagacggcacacctttggcaggatcttctttgcctcctccctttccaccttgtacattacggactgctttgactaggtatgcggatttgctgaacacccccaaaaagagcgctttgctggccttagctgcatatgcttccgatcctaatgaagccgatagactaaaatacctagccagtcccgctggcaaggacgagtacgcacaatctcttgtcgctaaccaaagatcgcttttagaggtaatggccgagtttccctctgcaaaaccaccacttggggtttttttcgcggctattgctcctcgtcttcaaccaaggttctattcaatttcctctagtccgcgtatggctcctagtagaatccatgttacatgtgcattagtctacgaaaagactccaggtggtagaattcataagggagtttgttctacttggatgaaaaatgctattccgctggaagaatcacgtgactgctcgtgggcccccatctttgtacgtcaaagtaattttaagcttcctgcagaccctaaggtgccagtgataatgataggtccaggtaccggcttggctcctttcagaggattcttacaggaaaggttagctttgaaggaagaaggcgcagaattgggtactgctgtgttcttctttggttgtcgtaacagaaaaatggactacatttacgaagatgagctaaaccatttcttagaaattggtgccttgtccgaactattagtcgccttcagcagggagggccctacgaagcaatacgttcagcataaaatggctgaaaaagcgtcagacatttggcgaatgataagtgatggtgcctatgtgtatgtgtgcggggatgcaaagggtatggctcgtgatgtccacagaacactacatactatcgcccaagagcaaggctcgatggattctacacaagctgaaggttttgtaaagaatctacaaatgacgggtaggtacctaagagatgtttgg

SEQ ID NO: 1414 - DNA, 3450 bp, Artificial Sequence
  G8H-CPR engineered fusion
atggattacctgactataatacttacacttctcttcgctctaactctttacgaagctttttcttatttatcacgaagaactaaaaacttacctccaggtccgtcgccactgccatttatcggttctttacatctattgggtgatcaacctcataagtccttggctaaattgtcaaagaaacacggaccgattatgtcgctaaaattaggtcaaatcactaccattgttatatcttcatccaccatggcgaaggaagttttgcagaagcaggatttggccttttcatctagatctgtaccgaatgcgttgcacgcccataaccaatttaaattcagcgttgtatggctaccagtggcatcaaggtggaggtcactcagaaaggtccttaattccaatattttctcgggaaatagattagacgcaaaccaacacttgagaacacggaaagtccaggaattaatagcatactgtagaaaaaactcgcaaagtggtgaagccgtggatgtgggtagagccgcatttagaacttcattaaatctattgtccaatcttattttctcaaaagatctaacggacccatacagcgactctgcaaaagaattcaaggatcttgtttggaacatcatggttgaagcaggcaaacccaacttagtggactttttcccattattagaaaaagttgatccacaaggaatcagacatcgaatgactattcattttggtgaagtgctaaagttatttggtggtttagtcaacgagagactagaacaaaggaggtcaaaaggcgaaaagaacgatgtcctggatgtcttacttactacttcacaggaaagtcctgaagagattgatagaactcacattgaaagaatgtgtttagatttattcgtcgcaggtaccgatacgacaagttctacattagagtgggctatgtcagagatgcttaagaatccagacaaaatgaagaaaactcaagatgaactagctcaagttattggcaggggtaaaaccattgaagaatcagatattaatcgtctaccttatttgaggtgtgtcatgaaggaaactttaagaatacatcctcctgtaccattcctgattccaagaaaggttgagcaatccgttgaagtttgtggttataatgtaccgaaaggttcacaagtattagtcaatgcctgggcaattggcagagacgaaactgtatgggacgatgccttagcattcaagccagaacgctttatggaaagtgaactagatatacgaggcagagactttgagttgattccatttggtgctggccggagaatttgtcctgggttaccgttagctttgcgtacagttccacttatgttgggatccctacttaactcattcaattggaaattggaagggggaatggctcctaaggacttggacatggaggaaaaatttggcatcactttgcaaaaggcacacccacttagagccgtaccatcgactctaggtggcggctctggcggaagcacatctagcggtagttccggtggttggaaaaaaacgactgcagacagatcaggtgagttgaaaccactgatgattccaaaatctctgatggctaaagacgaagatgatgacttggatcttggctctggcaagacaagagtttctatcttttttggtacacaaactggtacggctgaagggttcgccaaagccttaagtgaagaaattaaagcaaggtatgaaaaggcggccgtgaaagatgactacgctgcagatgatgaccaatacgaagaaaagctcaaaaaagagactcttgcttttttctgcgttgctacgtacggtgatggagaaccaacagacaacgccgcgagattttataaatggtttactgaagaaaatgaaagagacattaagcttcagcagctagcatacggagttttcgctctcggtaatagacagtatgaacattttaacaagattggaatagtcctagatgaggaattgtgcaaaaaaggagctaagagactgattgaagttggattgggtgatgatgatcagtcaattgaagatgattttaatgcgtggaaagagtcgttgtggagcgaattagataagctactgaaggatgaagatgataaatctgtggctacaccctacaccgccgttatcccagagtacagggtagttacccatgatcctagatttacaactcaaaaatccatggagagtaatgtggcaaacggaaataccactatcgatatccatcatccctgtcgtgtagacgttgctgtgcagaaagagttacacactcatgaatctgatagatcttgtattcacttggagttcgacatttcgagaacaggtataacatacgaaactggggatcacgtcggtgtttatgccgaaaatcatgttgagatcgttgaagaagccggtaaacttttgggtcacagtttggaccttgttttttcaattcacgccgataaagaggacggctcacctttagaatctgcagtgccccccccctttccggggccatgtacgcttggcacaggtctagcgagatacgcagatcttctcaatccacctagaaagtcagctctcgttgcattagcagcttatgcaactgaaccgtctgaggccgagaagttgaagcacttgacctctccggatggtaaagatgagtatagtcagtggattgtagcatctcagagaagtttattggaggtcatggctgcttttccaagcgctaagcctcctctaggtgtctttttcgctgctatcgctcctaggctacagccgagatattacagcatatcatcctctccaagattggctccatcgcgcgtacacgtgacttccgctctggtatatggaccaaccccaaccggtagaattcacaaaggtgtctgctcaacatggatgaaaaacgcagtgccagccgagaagtcacatgagtgtagtggtgctccaatattcataagagcctctaatttcaaacttccaagcaatccgtctacaccaatcgtcatggttggtcccggaacaggtttggctccatttaggggatttctacaagagaggatggcattaaaagaagatggtgaagaattagggagctcgttgttatttttcggatgccgaaatcgtcaaatggacttcatttacgaagatgaattgaacaactttgttgaccaaggtgttatttcagagctaataatggcgttcagtagagaaggagcacaaaaagaatacgtccaacataaaatgatggaaaaagctgcccaagtttgggatttgattaaagaagaaggttatttatatgtgtgtggagatgctaaaggtatggcaagagatgttcataggacacttcatactatagttcaggaacaagaaggcgtatcgagtagcgaggcggaggctatagttaaaaaattgcaaacagagggtcgttacctgagagatgtgtgg

SEQ ID NO: 1415 - DNA, 3462 bp, Artificial Sequence
  G8H-CPR engineered fusion
atggattacctgactataatacttacacttctcttcgctctaactctttacgaagctttttcttatttatcacgaagaactaaaaacttacctccaggtccgtcgccactgccatttatcggttctttacatctattgggtgatcaacctcataagtccttggctaaattgtcaaagaaacacggaccgattatgtcgctaaaattaggtcaaatcactaccattgttatatcttcatccaccatggcgaaggaagttttgcagaagcaggatttggccttttcatctagatctgtaccgaatgcgttgcacgcccataaccaatttaaattcagcgttgtatggctaccagtggcatcaaggtggaggtcactcagaaaggtccttaattccaatattttctcgggaaatagattagacgcaaaccaacacttgagaacacggaaagtccaggaattaatagcatactgtagaaaaaactcgcaaagtggtgaagccgtggatgtgggtagagccgcatttagaacttcattaaatctattgtccaatcttattttctcaaaagatctaacggacccatacagcgactctgcaaaagaattcaaggatcttgtttggaacatcatggttgaagcaggcaaacccaacttagtggactttttcccattattagaaaaagttgatccacaaggaatcagacatcgaatgactattcattttggtgaagtgctaaagttatttggtggtttagtcaacgagagactagaacaaaggaggtcaaaaggcgaaaagaacgatgtcctggatgtcttacttactacttcacaggaaagtcctgaagagattgatagaactcacattgaaagaatgtgtttagatttattcgtcgcaggtaccgatacgacaagttctacattagagtgggctatgtcagagatgcttaagaatccagacaaaatgaagaaaactcaagatgaactagctcaagttattggcaggggtaaaaccattgaagaatcagatattaatcgtctaccttatttgaggtgtgtcatgaaggaaactttaagaatacatcctcctgtaccattcctgattccaagaaaggttgagcaatccgttgaagtttgtggttataatgtaccgaaaggttcacaagtattagtcaatgcctgggcaattggcagagacgaaactgtatgggacgatgccttagcattcaagccagaacgctttatggaaagtgaactagatatacgaggcagagactttgagttgattccatttggtgctggccggagaatttgtcctgggttaccgttagctttgcgtacagttccacttatgttgggatccctacttaactcattcaattggaaattggaagggggaatggctcctaaggacttggacatggaggaaaaatttggcatcactttgcaaaaggcacacccacttagagccgtaccatcgactctaggtggcggctctggcggaagcacatctagcggtagttccggtggttggagacggtcctccggatctggtaaaaaggttgttgaaccacctaaactaatcgtgccaaaaagtgttgtcgaaccagaggaaatcgatgaaggtaagaaaaagtttactatattttttggcacccagacaggtacggctgagggcttcgcaaaggcactagccgaggaagctaaagctaggtatgaaaaggcagtcattaaggttatcgatatagacgattatgcggctgatgacgaggaatatgaagaaaaatttaggaaggaaacgttagcttttttcattctggctacttacggcgatggtgaaccaacagacaatgcagccagattctacaagtggtttgttgaagggaatgacaggggtgattggttaaaaaatttgcaatacggtgtttttggcctcgggaatcgccagtacgaacatttcaataagatagccaaagtggtagatgagaaggttgcggaacaaggtggcaaacgtatcgtccccttagttttaggcgatgacgatcagtgtattgaagacgatttcgcggcatggcgtgaaaatgtttggcccgaacttgataatcttcttagagacgaagacgatactactgtttcaacaacctacacggccgcaatccccgaatacagagttgttttcccagataagtcagatagcttaatttcagaagcaaatggtcacgctaatggttatgctaatgggaatacggtctacgatgctcaacacccatgcagatctaatgttgcagtccgcaaggagttacacactccagcatcagatcgctcatgtactcatcttgatttcgatatcgctggcaccggattgagctacgggactggagatcatgtaggtgtctattgtgataatttatctgaaaccgtcgaggaagctgagaggttgcttaatctgccgcctgaaacgtattttagcctccacgctgataaggaagacggcacacctttggcaggatcttctttgcctcctccctttccaccttgtacattacggactgctttgactaggtatgcggatttgctgaacacccccaaaaagagcgctttgctggccttagctgcatatgcttccgatcctaatgaagccgatagactaaaatacctagccagtcccgctggcaaggacgagtacgcacaatctcttgtcgctaaccaaagatcgcttttagaggtaatggccgagtttccctctgcaaaaccaccacttggggtttttttcgcggctattgctcctcgtcttcaaccaaggttctattcaatttcctctagtccgcgtatggctcctagtagaatccatgttacatgtgcattagtctacgaaaagactccaggtggtagaattcataagggagtttgttctacttggatgaaaaatgctattccgctggaagaatcacgtgactgctcgtgggcccccatctttgtacgtcaaagtaattttaagcttcctgcagaccctaaggtgccagtgataatgataggtccaggtaccggcttggctcctttcagaggattcttacaggaaaggttagctttgaaggaagaaggcgcagaattgggtactgctgtgttcttctttggttgtcgtaacagaaaaatggactacatttacgaagatgagctaaaccatttcttagaaattggtgccttgtccgaactattagtcgccttcagcagggagggccctacgaagcaatacgttcagcataaaatggctgaaaaagcgtcagacatttggcgaatgataagtgatggtgcctatgtgtatgtgtgcggggatgcaaagggtatggctcgtgatgtccacagaacactacatactatcgcccaagagcaaggctcgatggattctacacaagctgaaggttttgtaaagaatctacaaatgacgggtaggtacctaagagatgtttgg

SEQ ID NO: 1416 - DNA, 3420 bp, Artificial Sequence
  G8H-CPR engineered fusion
atggattttctgacaattttcattggtcctcttctggcaatcattgcattgttctacgctcgcttaacaattagcactcgtggaaagaatctacccccaggtcccactcctttaccatttattggtaatttacacttgctcggtcatcatccccataagtctttggcacgtcttgccaagacttatggtccattgatgttacttagactagggtctgaaaatactgtggtcgtatcttcggctgccgttgctaaagaagtattgcaaaaacatgatttggcctttagttctcgatccatacctgatgcagttcatgcacacgatcaattcaagtactccgtggtttggttgccagttgcctctagatggagatctttaagaaaaactatgaactccaatatcttttcgggctcctgcttagatgccaatcagcatttaagaagtaggaaggttgaagaattaatcgcctattgtaaagaaagctgtaggcgtgctgaagcagtagacgtcgggcgtgctgctttcagaaccgctttaaattctttgtcaaacacaattttttctcgagaccttgctgatccattatccgactctggtaaggaatttaaggacgttgtttcttcgatcatgatggaggcgggcaagccaaacagtgtagactactatccgttcctgtctcgattcgatccccaaggaatccgtagaaggaccgcaatctattttgataaactgattaacatcttcaagggtttgattgacgaacgtctcgaaaaaagaaggtcgcagtacgaagaggctacggatgtaatcgatatattacttaacactattgaacagaacccagaagaaatcgaccgaactcatatcgagagaatgttcttagatctctttttggctggtacagatacgacatcttcgacggtcgaatgggccatggctgaagccatgaagaacccagaaaccatgaagaaagctaaggcggaattagctcaagttatcggcaaggggaaaatagtccaagaaactgatataccacacctaccatatttgcaatgcatcgtaaaggagacactacgattacacccacctgtacccttccttatcccacgtcgtgttcatgaagacgtggacatattgggttatgtcgttccaaataactcacaagtgttcgttaacatgtgggccattgggagggacccagatatgtggaaaaatccattacaatttgatcccgaccgttttcatgattccgaagtcggtctgagaggtaaagattttgaattgattcccttcggcgctggcagaagaatttgcccaggattacctttggctatgcgtatggtgcctgttgttttaggatctctcttgaactccttcgattggaaggtcgaaggtggtaaagaactggaaatgaatgaaaagtttggaataactcttgaaaaagcacaacctttaatggcagtacccatcgcattaggcagtacttcctctggttggaaaaaaacgactgcagacagatcaggtgagttgaaaccactgatgattccaaaatctctgatggctaaagacgaagatgatgacttggatcttggctctggcaagacaagagtttctatcttttttggtacacaaactggtacggctgaagggttcgccaaagccttaagtgaagaaattaaagcaaggtatgaaaaggcggccgtgaaagatgactacgctgcagatgatgaccaatacgaagaaaagctcaaaaaagagactcttgcttttttctgcgttgctacgtacggtgatggagaaccaacagacaacgccgcgagattttataaatggtttactgaagaaaatgaaagagacattaagcttcagcagctagcatacggagttttcgctctcggtaatagacagtatgaacattttaacaagattggaatagtcctagatgaggaattgtgcaaaaaaggagctaagagactgattgaagttggattgggtgatgatgatcagtcaattgaagatgattttaatgcgtggaaagagtcgttgtggagcgaattagataagctactgaaggatgaagatgataaatctgtggctacaccctacaccgccgttatcccagagtacagggtagttacccatgatcctagatttacaactcaaaaatccatggagagtaatgtggcaaacggaaataccactatcgatatccatcatccctgtcgtgtagacgttgctgtgcagaaagagttacacactcatgaatctgatagatcttgtattcacttggagttcgacatttcgagaacaggtataacatacgaaactggggatcacgtcggtgtttatgccgaaaatcatgttgagatcgttgaagaagccggtaaacttttgggtcacagtttggaccttgttttttcaattcacgccgataaagaggacggctcacctttagaatctgcagtgccccccccctttccggggccatgtacgcttggcacaggtctagcgagatacgcagatcttctcaatccacctagaaagtcagctctcgttgcattagcagcttatgcaactgaaccgtctgaggccgagaagttgaagcacttgacctctccggatggtaaagatgagtatagtcagtggattgtagcatctcagagaagtttattggaggtcatggctgcttttccaagcgctaagcctcctctaggtgtctttttcgctgctatcgctcctaggctacagccgagatattacagcatatcatcctctccaagattggctccatcgcgcgtacacgtgacttccgctctggtatatggaccaaccccaaccggtagaattcacaaaggtgtctgctcaacatggatgaaaaacgcagtgccagccgagaagtcacatgagtgtagtggtgctccaatattcataagagcctctaatttcaaacttccaagcaatccgtctacaccaatcgtcatggttggtcccggaacaggtttggctccatttaggggatttctacaagagaggatggcattaaaagaagatggtgaagaattagggagctcgttgttatttttcggatgccgaaatcgtcaaatggacttcatttacgaagatgaattgaacaactttgttgaccaaggtgttatttcagagctaataatggcgttcagtagagaaggagcacaaaaagaatacgtccaacataaaatgatggaaaaagctgcccaagtttgggatttgattaaagaagaaggttatttatatgtgtgtggagatgctaaaggtatggcaagagatgttcataggacacttcatactatagttcaggaacaagaaggcgtatcgagtagcgaggcggaggctatagttaaaaaattgcaaacagagggtcgttacctgagagatgtgtgg

SEQ ID NO: 1417 - DNA, 3432 bp, Artificial Sequence
  G8H-CPR engineered fusion
atggattttctgacaattttcattggtcctcttctggcaatcattgcattgttctacgctcgcttaacaattagcactcgtggaaagaatctacccccaggtcccactcctttaccatttattggtaatttacacttgctcggtcatcatccccataagtctttggcacgtcttgccaagacttatggtccattgatgttacttagactagggtctgaaaatactgtggtcgtatcttcggctgccgttgctaaagaagtattgcaaaaacatgatttggcctttagttctcgatccatacctgatgcagttcatgcacacgatcaattcaagtactccgtggtttggttgccagttgcctctagatggagatctttaagaaaaactatgaactccaatatcttttcgggctcctgcttagatgccaatcagcatttaagaagtaggaaggttgaagaattaatcgcctattgtaaagaaagctgtaggcgtgctgaagcagtagacgtcgggcgtgctgctttcagaaccgctttaaattctttgtcaaacacaattttttctcgagaccttgctgatccattatccgactctggtaaggaatttaaggacgttgtttcttcgatcatgatggaggcgggcaagccaaacagtgtagactactatccgttcctgtctcgattcgatccccaaggaatccgtagaaggaccgcaatctattttgataaactgattaacatcttcaagggtttgattgacgaacgtctcgaaaaaagaaggtcgcagtacgaagaggctacggatgtaatcgatatattacttaacactattgaacagaacccagaagaaatcgaccgaactcatatcgagagaatgttcttagatctctttttggctggtacagatacgacatcttcgacggtcgaatgggccatggctgaagccatgaagaacccagaaaccatgaagaaagctaaggcggaattagctcaagttatcggcaaggggaaaatagtccaagaaactgatataccacacctaccatatttgcaatgcatcgtaaaggagacactacgattacacccacctgtacccttccttatcccacgtcgtgttcatgaagacgtggacatattgggttatgtcgttccaaataactcacaagtgttcgttaacatgtgggccattgggagggacccagatatgtggaaaaatccattacaatttgatcccgaccgttttcatgattccgaagtcggtctgagaggtaaagattttgaattgattcccttcggcgctggcagaagaatttgcccaggattacctttggctatgcgtatggtgcctgttgttttaggatctctcttgaactccttcgattggaaggtcgaaggtggtaaagaactggaaatgaatgaaaagtttggaataactcttgaaaaagcacaacctttaatggcagtacccatcgcattaggcagtacttcctctggttggagacggtcctccggatctggtaaaaaggttgttgaaccacctaaactaatcgtgccaaaaagtgttgtcgaaccagaggaaatcgatgaaggtaagaaaaagtttactatattttttggcacccagacaggtacggctgagggcttcgcaaaggcactagccgaggaagctaaagctaggtatgaaaaggcagtcattaaggttatcgatatagacgattatgcggctgatgacgaggaatatgaagaaaaatttaggaaggaaacgttagcttttttcattctggctacttacggcgatggtgaaccaacagacaatgcagccagattctacaagtggtttgttgaagggaatgacaggggtgattggttaaaaaatttgcaatacggtgtttttggcctcgggaatcgccagtacgaacatttcaataagatagccaaagtggtagatgagaaggttgcggaacaaggtggcaaacgtatcgtccccttagttttaggcgatgacgatcagtgtattgaagacgatttcgcggcatggcgtgaaaatgtttggcccgaacttgataatcttcttagagacgaagacgatactactgtttcaacaacctacacggccgcaatccccgaatacagagttgttttcccagataagtcagatagcttaatttcagaagcaaatggtcacgctaatggttatgctaatgggaatacggtctacgatgctcaacacccatgcagatctaatgttgcagtccgcaaggagttacacactccagcatcagatcgctcatgtactcatcttgatttcgatatcgctggcaccggattgagctacgggactggagatcatgtaggtgtctattgtgataatttatctgaaaccgtcgaggaagctgagaggttgcttaatctgccgcctgaaacgtattttagcctccacgctgataaggaagacggcacacctttggcaggatcttctttgcctcctccctttccaccttgtacattacggactgctttgactaggtatgcggatttgctgaacacccccaaaaagagcgctttgctggccttagctgcatatgcttccgatcctaatgaagccgatagactaaaatacctagccagtcccgctggcaaggacgagtacgcacaatctcttgtcgctaaccaaagatcgcttttagaggtaatggccgagtttccctctgcaaaaccaccacttggggtttttttcgcggctattgctcctcgtcttcaaccaaggttctattcaatttcctctagtccgcgtatggctcctagtagaatccatgttacatgtgcattagtctacgaaaagactccaggtggtagaattcataagggagtttgttctacttggatgaaaaatgctattccgctggaagaatcacgtgactgctcgtgggcccccatctttgtacgtcaaagtaattttaagcttcctgcagaccctaaggtgccagtgataatgataggtccaggtaccggcttggctcctttcagaggattcttacaggaaaggttagctttgaaggaagaaggcgcagaattgggtactgctgtgttcttctttggttgtcgtaacagaaaaatggactacatttacgaagatgagctaaaccatttcttagaaattggtgccttgtccgaactattagtcgccttcagcagggagggccctacgaagcaatacgttcagcataaaatggctgaaaaagcgtcagacatttggcgaatgataagtgatggtgcctatgtgtatgtgtgcggggatgcaaagggtatggctcgtgatgtccacagaacactacatactatcgcccaagagcaaggctcgatggattctacacaagctgaaggttttgtaaagaatctacaaatgacgggtaggtacctaagagatgtttgg

SEQ ID NO: 1418 - DNA, 3432 bp, Artificial Sequence
  G8H-CPR engineered fusion
atggattttctgacaattttcattggtcctcttctggcaatcattgcattgttctacgctcgcttaacaattagcactcgtggaaagaatctacccccaggtcccactcctttaccatttattggtaatttacacttgctcggtcatcatccccataagtctttggcacgtcttgccaagacttatggtccattgatgttacttagactagggtctgaaaatactgtggtcgtatcttcggctgccgttgctaaagaagtattgcaaaaacatgatttggcctttagttctcgatccatacctgatgcagttcatgcacacgatcaattcaagtactccgtggtttggttgccagttgcctctagatggagatctttaagaaaaactatgaactccaatatcttttcgggctcctgcttagatgccaatcagcatttaagaagtaggaaggttgaagaattaatcgcctattgtaaagaaagctgtaggcgtgctgaagcagtagacgtcgggcgtgctgctttcagaaccgctttaaattctttgtcaaacacaattttttctcgagaccttgctgatccattatccgactctggtaaggaatttaaggacgttgtttcttcgatcatgatggaggcgggcaagccaaacagtgtagactactatccgttcctgtctcgattcgatccccaaggaatccgtagaaggaccgcaatctattttgataaactgattaacatcttcaagggtttgattgacgaacgtctcgaaaaaagaaggtcgcagtacgaagaggctacggatgtaatcgatatattacttaacactattgaacagaacccagaagaaatcgaccgaactcatatcgagagaatgttcttagatctctttttggctggtacagatacgacatcttcgacggtcgaatgggccatggctgaagccatgaagaacccagaaaccatgaagaaagctaaggcggaattagctcaagttatcggcaaggggaaaatagtccaagaaactgatataccacacctaccatatttgcaatgcatcgtaaaggagacactacgattacacccacctgtacccttccttatcccacgtcgtgttcatgaagacgtggacatattgggttatgtcgttccaaataactcacaagtgttcgttaacatgtgggccattgggagggacccagatatgtggaaaaatccattacaatttgatcccgaccgttttcatgattccgaagtcggtctgagaggtaaagattttgaattgattcccttcggcgctggcagaagaatttgcccaggattacctttggctatgcgtatggtgcctgttgttttaggatctctcttgaactccttcgattggaaggtcgaaggtggtaaagaactggaaatgaatgaaaagtttggaataactcttgaaaaagcacaacctttaatggcagtacccatcgcattaggttctacttcctccggttcctcaggcggatggaaaaaaacgactgcagacagatcaggtgagttgaaaccactgatgattccaaaatctctgatggctaaagacgaagatgatgacttggatcttggctctggcaagacaagagtttctatcttttttggtacacaaactggtacggctgaagggttcgccaaagccttaagtgaagaaattaaagcaaggtatgaaaaggcggccgtgaaagatgactacgctgcagatgatgaccaatacgaagaaaagctcaaaaaagagactcttgcttttttctgcgttgctacgtacggtgatggagaaccaacagacaacgccgcgagattttataaatggtttactgaagaaaatgaaagagacattaagcttcagcagctagcatacggagttttcgctctcggtaatagacagtatgaacattttaacaagattggaatagtcctagatgaggaattgtgcaaaaaaggagctaagagactgattgaagttggattgggtgatgatgatcagtcaattgaagatgattttaatgcgtggaaagagtcgttgtggagcgaattagataagctactgaaggatgaagatgataaatctgtggctacaccctacaccgccgttatcccagagtacagggtagttacccatgatcctagatttacaactcaaaaatccatggagagtaatgtggcaaacggaaataccactatcgatatccatcatccctgtcgtgtagacgttgctgtgcagaaagagttacacactcatgaatctgatagatcttgtattcacttggagttcgacatttcgagaacaggtataacatacgaaactggggatcacgtcggtgtttatgccgaaaatcatgttgagatcgttgaagaagccggtaaacttttgggtcacagtttggaccttgttttttcaattcacgccgataaagaggacggctcacctttagaatctgcagtgccccccccctttccggggccatgtacgcttggcacaggtctagcgagatacgcagatcttctcaatccacctagaaagtcagctctcgttgcattagcagcttatgcaactgaaccgtctgaggccgagaagttgaagcacttgacctctccggatggtaaagatgagtatagtcagtggattgtagcatctcagagaagtttattggaggtcatggctgcttttccaagcgctaagcctcctctaggtgtctttttcgctgctatcgctcctaggctacagccgagatattacagcatatcatcctctccaagattggctccatcgcgcgtacacgtgacttccgctctggtatatggaccaaccccaaccggtagaattcacaaaggtgtctgctcaacatggatgaaaaacgcagtgccagccgagaagtcacatgagtgtagtggtgctccaatattcataagagcctctaatttcaaacttccaagcaatccgtctacaccaatcgtcatggttggtcccggaacaggtttggctccatttaggggatttctacaagagaggatggcattaaaagaagatggtgaagaattagggagctcgttgttatttttcggatgccgaaatcgtcaaatggacttcatttacgaagatgaattgaacaactttgttgaccaaggtgttatttcagagctaataatggcgttcagtagagaaggagcacaaaaagaatacgtccaacataaaatgatggaaaaagctgcccaagtttgggatttgattaaagaagaaggttatttatatgtgtgtggagatgctaaaggtatggcaagagatgttcataggacacttcatactatagttcaggaacaagaaggcgtatcgagtagcgaggcggaggctatagttaaaaaattgcaaacagagggtcgttacctgagagatgtgtgg

SEQ ID NO: 1419 - DNA, 3444 bp, Artificial Sequence
  G8H-CPR engineered fusion
atggattttctgacaattttcattggtcctcttctggcaatcattgcattgttctacgctcgcttaacaattagcactcgtggaaagaatctacccccaggtcccactcctttaccatttattggtaatttacacttgctcggtcatcatccccataagtctttggcacgtcttgccaagacttatggtccattgatgttacttagactagggtctgaaaatactgtggtcgtatcttcggctgccgttgctaaagaagtattgcaaaaacatgatttggcctttagttctcgatccatacctgatgcagttcatgcacacgatcaattcaagtactccgtggtttggttgccagttgcctctagatggagatctttaagaaaaactatgaactccaatatcttttcgggctcctgcttagatgccaatcagcatttaagaagtaggaaggttgaagaattaatcgcctattgtaaagaaagctgtaggcgtgctgaagcagtagacgtcgggcgtgctgctttcagaaccgctttaaattctttgtcaaacacaattttttctcgagaccttgctgatccattatccgactctggtaaggaatttaaggacgttgtttcttcgatcatgatggaggcgggcaagccaaacagtgtagactactatccgttcctgtctcgattcgatccccaaggaatccgtagaaggaccgcaatctattttgataaactgattaacatcttcaagggtttgattgacgaacgtctcgaaaaaagaaggtcgcagtacgaagaggctacggatgtaatcgatatattacttaacactattgaacagaacccagaagaaatcgaccgaactcatatcgagagaatgttcttagatctctttttggctggtacagatacgacatcttcgacggtcgaatgggccatggctgaagccatgaagaacccagaaaccatgaagaaagctaaggcggaattagctcaagttatcggcaaggggaaaatagtccaagaaactgatataccacacctaccatatttgcaatgcatcgtaaaggagacactacgattacacccacctgtacccttccttatcccacgtcgtgttcatgaagacgtggacatattgggttatgtcgttccaaataactcacaagtgttcgttaacatgtgggccattgggagggacccagatatgtggaaaaatccattacaatttgatcccgaccgttttcatgattccgaagtcggtctgagaggtaaagattttgaattgattcccttcggcgctggcagaagaatttgcccaggattacctttggctatgcgtatggtgcctgttgttttaggatctctcttgaactccttcgattggaaggtcgaaggtggtaaagaactggaaatgaatgaaaagtttggaataactcttgaaaaagcacaacctttaatggcagtacccatcgcattaggttctacttcctccggttcctcaggcggatggagacggtcctccggatctggtaaaaaggttgttgaaccacctaaactaatcgtgccaaaaagtgttgtcgaaccagaggaaatcgatgaaggtaagaaaaagtttactatattttttggcacccagacaggtacggctgagggcttcgcaaaggcactagccgaggaagctaaagctaggtatgaaaaggcagtcattaaggttatcgatatagacgattatgcggctgatgacgaggaatatgaagaaaaatttaggaaggaaacgttagcttttttcattctggctacttacggcgatggtgaaccaacagacaatgcagccagattctacaagtggtttgttgaagggaatgacaggggtgattggttaaaaaatttgcaatacggtgtttttggcctcgggaatcgccagtacgaacatttcaataagatagccaaagtggtagatgagaaggttgcggaacaaggtggcaaacgtatcgtccccttagttttaggcgatgacgatcagtgtattgaagacgatttcgcggcatggcgtgaaaatgtttggcccgaacttgataatcttcttagagacgaagacgatactactgtttcaacaacctacacggccgcaatccccgaatacagagttgttttcccagataagtcagatagcttaatttcagaagcaaatggtcacgctaatggttatgctaatgggaatacggtctacgatgctcaacacccatgcagatctaatgttgcagtccgcaaggagttacacactccagcatcagatcgctcatgtactcatcttgatttcgatatcgctggcaccggattgagctacgggactggagatcatgtaggtgtctattgtgataatttatctgaaaccgtcgaggaagctgagaggttgcttaatctgccgcctgaaacgtattttagcctccacgctgataaggaagacggcacacctttggcaggatcttctttgcctcctccctttccaccttgtacattacggactgctttgactaggtatgcggatttgctgaacacccccaaaaagagcgctttgctggccttagctgcatatgcttccgatcctaatgaagccgatagactaaaatacctagccagtcccgctggcaaggacgagtacgcacaatctcttgtcgctaaccaaagatcgcttttagaggtaatggccgagtttccctctgcaaaaccaccacttggggtttttttcgcggctattgctcctcgtcttcaaccaaggttctattcaatttcctctagtccgcgtatggctcctagtagaatccatgttacatgtgcattagtctacgaaaagactccaggtggtagaattcataagggagtttgttctacttggatgaaaaatgctattccgctggaagaatcacgtgactgctcgtgggcccccatctttgtacgtcaaagtaattttaagcttcctgcagaccctaaggtgccagtgataatgataggtccaggtaccggcttggctcctttcagaggattcttacaggaaaggttagctttgaaggaagaaggcgcagaattgggtactgctgtgttcttctttggttgtcgtaacagaaaaatggactacatttacgaagatgagctaaaccatttcttagaaattggtgccttgtccgaactattagtcgccttcagcagggagggccctacgaagcaatacgttcagcataaaatggctgaaaaagcgtcagacatttggcgaatgataagtgatggtgcctatgtgtatgtgtgcggggatgcaaagggtatggctcgtgatgtccacagaacactacatactatcgcccaagagcaaggctcgatggattctacacaagctgaaggttttgtaaagaatctacaaatgacgggtaggtacctaagagatgtttgg

SEQ ID NO: 1420 - DNA, 3447 bp, Artificial Sequence
  G8H-CPR engineered fusion
atggattttctgacaattttcattggtcctcttctggcaatcattgcattgttctacgctcgcttaacaattagcactcgtggaaagaatctacccccaggtcccactcctttaccatttattggtaatttacacttgctcggtcatcatccccataagtctttggcacgtcttgccaagacttatggtccattgatgttacttagactagggtctgaaaatactgtggtcgtatcttcggctgccgttgctaaagaagtattgcaaaaacatgatttggcctttagttctcgatccatacctgatgcagttcatgcacacgatcaattcaagtactccgtggtttggttgccagttgcctctagatggagatctttaagaaaaactatgaactccaatatcttttcgggctcctgcttagatgccaatcagcatttaagaagtaggaaggttgaagaattaatcgcctattgtaaagaaagctgtaggcgtgctgaagcagtagacgtcgggcgtgctgctttcagaaccgctttaaattctttgtcaaacacaattttttctcgagaccttgctgatccattatccgactctggtaaggaatttaaggacgttgtttcttcgatcatgatggaggcgggcaagccaaacagtgtagactactatccgttcctgtctcgattcgatccccaaggaatccgtagaaggaccgcaatctattttgataaactgattaacatcttcaagggtttgattgacgaacgtctcgaaaaaagaaggtcgcagtacgaagaggctacggatgtaatcgatatattacttaacactattgaacagaacccagaagaaatcgaccgaactcatatcgagagaatgttcttagatctctttttggctggtacagatacgacatcttcgacggtcgaatgggccatggctgaagccatgaagaacccagaaaccatgaagaaagctaaggcggaattagctcaagttatcggcaaggggaaaatagtccaagaaactgatataccacacctaccatatttgcaatgcatcgtaaaggagacactacgattacacccacctgtacccttccttatcccacgtcgtgttcatgaagacgtggacatattgggttatgtcgttccaaataactcacaagtgttcgttaacatgtgggccattgggagggacccagatatgtggaaaaatccattacaatttgatcccgaccgttttcatgattccgaagtcggtctgagaggtaaagattttgaattgattcccttcggcgctggcagaagaatttgcccaggattacctttggctatgcgtatggtgcctgttgttttaggatctctcttgaactccttcgattggaaggtcgaaggtggtaaagaactggaaatgaatgaaaagtttggaataactcttgaaaaagcacaacctttaatggcagtacccatcgcattaggtggcggctctggcggaagcacatctagcggtagttccggtggttggaaaaaaacgactgcagacagatcaggtgagttgaaaccactgatgattccaaaatctctgatggctaaagacgaagatgatgacttggatcttggctctggcaagacaagagtttctatcttttttggtacacaaactggtacggctgaagggttcgccaaagccttaagtgaagaaattaaagcaaggtatgaaaaggcggccgtgaaagatgactacgctgcagatgatgaccaatacgaagaaaagctcaaaaaagagactcttgcttttttctgcgttgctacgtacggtgatggagaaccaacagacaacgccgcgagattttataaatggtttactgaagaaaatgaaagagacattaagcttcagcagctagcatacggagttttcgctctcggtaatagacagtatgaacattttaacaagattggaatagtcctagatgaggaattgtgcaaaaaaggagctaagagactgattgaagttggattgggtgatgatgatcagtcaattgaagatgattttaatgcgtggaaagagtcgttgtggagcgaattagataagctactgaaggatgaagatgataaatctgtggctacaccctacaccgccgttatcccagagtacagggtagttacccatgatcctagatttacaactcaaaaatccatggagagtaatgtggcaaacggaaataccactatcgatatccatcatccctgtcgtgtagacgttgctgtgcagaaagagttacacactcatgaatctgatagatcttgtattcacttggagttcgacatttcgagaacaggtataacatacgaaactggggatcacgtcggtgtttatgccgaaaatcatgttgagatcgttgaagaagccggtaaacttttgggtcacagtttggaccttgttttttcaattcacgccgataaagaggacggctcacctttagaatctgcagtgccccccccctttccggggccatgtacgcttggcacaggtctagcgagatacgcagatcttctcaatccacctagaaagtcagctctcgttgcattagcagcttatgcaactgaaccgtctgaggccgagaagttgaagcacttgacctctccggatggtaaagatgagtatagtcagtggattgtagcatctcagagaagtttattggaggtcatggctgcttttccaagcgctaagcctcctctaggtgtctttttcgctgctatcgctcctaggctacagccgagatattacagcatatcatcctctccaagattggctccatcgcgcgtacacgtgacttccgctctggtatatggaccaaccccaaccggtagaattcacaaaggtgtctgctcaacatggatgaaaaacgcagtgccagccgagaagtcacatgagtgtagtggtgctccaatattcataagagcctctaatttcaaacttccaagcaatccgtctacaccaatcgtcatggttggtcccggaacaggtttggctccatttaggggatttctacaagagaggatggcattaaaagaagatggtgaagaattagggagctcgttgttatttttcggatgccgaaatcgtcaaatggacttcatttacgaagatgaattgaacaactttgttgaccaaggtgttatttcagagctaataatggcgttcagtagagaaggagcacaaaaagaatacgtccaacataaaatgatggaaaaagctgcccaagtttgggatttgattaaagaagaaggttatttatatgtgtgtggagatgctaaaggtatggcaagagatgttcataggacacttcatactatagttcaggaacaagaaggcgtatcgagtagcgaggcggaggctatagttaaaaaattgcaaacagagggtcgttacctgagagatgtgtgg

SEQ ID NO: 1421 - DNA, 3459 bp, Artificial Sequence
  G8H-CPR engineered fusion
atggattttctgacaattttcattggtcctcttctggcaatcattgcattgttctacgctcgcttaacaattagcactcgtggaaagaatctacccccaggtcccactcctttaccatttattggtaatttacacttgctcggtcatcatccccataagtctttggcacgtcttgccaagacttatggtccattgatgttacttagactagggtctgaaaatactgtggtcgtatcttcggctgccgttgctaaagaagtattgcaaaaacatgatttggcctttagttctcgatccatacctgatgcagttcatgcacacgatcaattcaagtactccgtggtttggttgccagttgcctctagatggagatctttaagaaaaactatgaactccaatatcttttcgggctcctgcttagatgccaatcagcatttaagaagtaggaaggttgaagaattaatcgcctattgtaaagaaagctgtaggcgtgctgaagcagtagacgtcgggcgtgctgctttcagaaccgctttaaattctttgtcaaacacaattttttctcgagaccttgctgatccattatccgactctggtaaggaatttaaggacgttgtttcttcgatcatgatggaggcgggcaagccaaacagtgtagactactatccgttcctgtctcgattcgatccccaaggaatccgtagaaggaccgcaatctattttgataaactgattaacatcttcaagggtttgattgacgaacgtctcgaaaaaagaaggtcgcagtacgaagaggctacggatgtaatcgatatattacttaacactattgaacagaacccagaagaaatcgaccgaactcatatcgagagaatgttcttagatctctttttggctggtacagatacgacatcttcgacggtcgaatgggccatggctgaagccatgaagaacccagaaaccatgaagaaagctaaggcggaattagctcaagttatcggcaaggggaaaatagtccaagaaactgatataccacacctaccatatttgcaatgcatcgtaaaggagacactacgattacacccacctgtacccttccttatcccacgtcgtgttcatgaagacgtggacatattgggttatgtcgttccaaataactcacaagtgttcgttaacatgtgggccattgggagggacccagatatgtggaaaaatccattacaatttgatcccgaccgttttcatgattccgaagtcggtctgagaggtaaagattttgaattgattcccttcggcgctggcagaagaatttgcccaggattacctttggctatgcgtatggtgcctgttgttttaggatctctcttgaactccttcgattggaaggtcgaaggtggtaaagaactggaaatgaatgaaaagtttggaataactcttgaaaaagcacaacctttaatggcagtacccatcgcattaggtggcggctctggcggaagcacatctagcggtagttccggtggttggagacggtcctccggatctggtaaaaaggttgttgaaccacctaaactaatcgtgccaaaaagtgttgtcgaaccagaggaaatcgatgaaggtaagaaaaagtttactatattttttggcacccagacaggtacggctgagggcttcgcaaaggcactagccgaggaagctaaagctaggtatgaaaaggcagtcattaaggttatcgatatagacgattatgcggctgatgacgaggaatatgaagaaaaatttaggaaggaaacgttagcttttttcattctggctacttacggcgatggtgaaccaacagacaatgcagccagattctacaagtggtttgttgaagggaatgacaggggtgattggttaaaaaatttgcaatacggtgtttttggcctcgggaatcgccagtacgaacatttcaataagatagccaaagtggtagatgagaaggttgcggaacaaggtggcaaacgtatcgtccccttagttttaggcgatgacgatcagtgtattgaagacgatttcgcggcatggcgtgaaaatgtttggcccgaacttgataatcttcttagagacgaagacgatactactgtttcaacaacctacacggccgcaatccccgaatacagagttgttttcccagataagtcagatagcttaatttcagaagcaaatggtcacgctaatggttatgctaatgggaatacggtctacgatgctcaacacccatgcagatctaatgttgcagtccgcaaggagttacacactccagcatcagatcgctcatgtactcatcttgatttcgatatcgctggcaccggattgagctacgggactggagatcatgtaggtgtctattgtgataatttatctgaaaccgtcgaggaagctgagaggttgcttaatctgccgcctgaaacgtattttagcctccacgctgataaggaagacggcacacctttggcaggatcttctttgcctcctccctttccaccttgtacattacggactgctttgactaggtatgcggatttgctgaacacccccaaaaagagcgctttgctggccttagctgcatatgcttccgatcctaatgaagccgatagactaaaatacctagccagtcccgctggcaaggacgagtacgcacaatctcttgtcgctaaccaaagatcgcttttagaggtaatggccgagtttccctctgcaaaaccaccacttggggtttttttcgcggctattgctcctcgtcttcaaccaaggttctattcaatttcctctagtccgcgtatggctcctagtagaatccatgttacatgtgcattagtctacgaaaagactccaggtggtagaattcataagggagtttgttctacttggatgaaaaatgctattccgctggaagaatcacgtgactgctcgtgggcccccatctttgtacgtcaaagtaattttaagcttcctgcagaccctaaggtgccagtgataatgataggtccaggtaccggcttggctcctttcagaggattcttacaggaaaggttagctttgaaggaagaaggcgcagaattgggtactgctgtgttcttctttggttgtcgtaacagaaaaatggactacatttacgaagatgagctaaaccatttcttagaaattggtgccttgtccgaactattagtcgccttcagcagggagggccctacgaagcaatacgttcagcataaaatggctgaaaaagcgtcagacatttggcgaatgataagtgatggtgcctatgtgtatgtgtgcggggatgcaaagggtatggctcgtgatgtccacagaacactacatactatcgcccaagagcaaggctcgatggattctacacaagctgaaggttttgtaaagaatctacaaatgacgggtaggtacctaagagatgtttgg

SEQ ID NO: 1422 - DNA, 3423 bp, Artificial Sequence
  G8H-CPR engineered fusion
atggctttgttactggcggtatttcgcttaacaattagcactcgtggaaagaatctacccccaggtcccactcctttaccatttattggtaatttacacttgctcggtcatcatccccataagtctttggcacgtcttgccaagacttatggtccattgatgttacttagactagggtctgaaaatactgtggtcgtatcttcggctgccgttgctaaagaagtattgcaaaaacatgatttggcctttagttctcgatccatacctgatgcagttcatgcacacgatcaattcaagtactccgtggtttggttgccagttgcctctagatggagatctttaagaaaaactatgaactccaatatcttttcgggctcctgcttagatgccaatcagcatttaagaagtaggaaggttgaagaattaatcgcctattgtaaagaaagctgtaggcgtgctgaagcagtagacgtcgggcgtgctgctttcagaaccgctttaaattctttgtcaaacacaattttttctcgagaccttgctgatccattatccgactctggtaaggaatttaaggacgttgtttcttcgatcatgatggaggcgggcaagccaaacagtgtagactactatccgttcctgtctcgattcgatccccaaggaatccgtagaaggaccgcaatctattttgataaactgattaacatcttcaagggtttgattgacgaacgtctcgaaaaaagaaggtcgcagtacgaagaggctacggatgtaatcgatatattacttaacactattgaacagaacccagaagaaatcgaccgaactcatatcgagagaatgttcttagatctctttttggctggtacagatacgacatcttcgacggtcgaatgggccatggctgaagccatgaagaacccagaaaccatgaagaaagctaaggcggaattagctcaagttatcggcaaggggaaaatagtccaagaaactgatataccacacctaccatatttgcaatgcatcgtaaaggagacactacgattacacccacctgtacccttccttatcccacgtcgtgttcatgaagacgtggacatattgggttatgtcgttccaaataactcacaagtgttcgttaacatgtgggccattgggagggacccagatatgtggaaaaatccattacaatttgatcccgaccgttttcatgattccgaagtcggtctgagaggtaaagattttgaattgattcccttcggcgctggcagaagaatttgcccaggattacctttggctatgcgtatggtgcctgttgttttaggatctctcttgaactccttcgattggaaggtcgaaggtggtaaagaactggaaatgaatgaaaagtttggaataactcttgaaaaagcacaacctttaatggcagtacccatcgcattaggtggcggctctggcggaagcacatctagcggtagttccggtggttggagacggtcctccggatctggtaaaaaggttgttgaaccacctaaactaatcgtgccaaaaagtgttgtcgaaccagaggaaatcgatgaaggtaagaaaaagtttactatattttttggcacccagacaggtacggctgagggcttcgcaaaggcactagccgaggaagctaaagctaggtatgaaaaggcagtcattaaggttatcgatatagacgattatgcggctgatgacgaggaatatgaagaaaaatttaggaaggaaacgttagcttttttcattctggctacttacggcgatggtgaaccaacagacaatgcagccagattctacaagtggtttgttgaagggaatgacaggggtgattggttaaaaaatttgcaatacggtgtttttggcctcgggaatcgccagtacgaacatttcaataagatagccaaagtggtagatgagaaggttgcggaacaaggtggcaaacgtatcgtccccttagttttaggcgatgacgatcagtgtattgaagacgatttcgcggcatggcgtgaaaatgtttggcccgaacttgataatcttcttagagacgaagacgatactactgtttcaacaacctacacggccgcaatccccgaatacagagttgttttcccagataagtcagatagcttaatttcagaagcaaatggtcacgctaatggttatgctaatgggaatacggtctacgatgctcaacacccatgcagatctaatgttgcagtccgcaaggagttacacactccagcatcagatcgctcatgtactcatcttgatttcgatatcgctggcaccggattgagctacgggactggagatcatgtaggtgtctattgtgataatttatctgaaaccgtcgaggaagctgagaggttgcttaatctgccgcctgaaacgtattttagcctccacgctgataaggaagacggcacacctttggcaggatcttctttgcctcctccctttccaccttgtacattacggactgctttgactaggtatgcggatttgctgaacacccccaaaaagagcgctttgctggccttagctgcatatgcttccgatcctaatgaagccgatagactaaaatacctagccagtcccgctggcaaggacgagtacgcacaatctcttgtcgctaaccaaagatcgcttttagaggtaatggccgagtttccctctgcaaaaccaccacttggggtttttttcgcggctattgctcctcgtcttcaaccaaggttctattcaatttcctctagtccgcgtatggctcctagtagaatccatgttacatgtgcattagtctacgaaaagactccaggtggtagaattcataagggagtttgttctacttggatgaaaaatgctattccgctggaagaatcacgtgactgctcgtgggcccccatctttgtacgtcaaagtaattttaagcttcctgcagaccctaaggtgccagtgataatgataggtccaggtaccggcttggctcctttcagaggattcttacaggaaaggttagctttgaaggaagaaggcgcagaattgggtactgctgtgttcttctttggttgtcgtaacagaaaaatggactacatttacgaagatgagctaaaccatttcttagaaattggtgccttgtccgaactattagtcgccttcagcagggagggccctacgaagcaatacgttcagcataaaatggctgaaaaagcgtcagacatttggcgaatgataagtgatggtgcctatgtgtatgtgtgcggggatgcaaagggtatggctcgtgatgtccacagaacactacatactatcgcccaagagcaaggctcgatggattctacacaagctgaaggttttgtaaagaatctacaaatgacgggtaggtacctaagagatgtttgg

SEQ ID NO: 1423 - DNA, 3408 bp, Artificial Sequence
  G8H-CPR engineered fusion
atggattttctgacaattttcattggtcctcttctggcaatcattgcattgttctacgctcgcttaacaattagcactcgtggaaagaatctacccccaggtcccactcctttaccatttattggtaatttacacttgctcggtcatcatccccataagtctttggcacgtcttgccaagacttatggtccattgatgttacttagactagggtctgaaaatactgtggtcgtatcttcggctgccgttgctaaagaagtattgcaaaaacatgatttggcctttagttctcgatccatacctgatgcagttcatgcacacgatcaattcaagtactccgtggtttggttgccagttgcctctagatggagatctttaagaaaaactatgaactccaatatcttttcgggctcctgcttagatgccaatcagcatttaagaagtaggaaggttgaagaattaatcgcctattgtaaagaaagctgtaggcgtgctgaagcagtagacgtcgggcgtgctgctttcagaaccgctttaaattctttgtcaaacacaattttttctcgagaccttgctgatccattatccgactctggtaaggaatttaaggacgttgtttcttcgatcatgatggaggcgggcaagccaaacagtgtagactactatccgttcctgtctcgattcgatccccaaggaatccgtagaaggaccgcaatctattttgataaactgattaacatcttcaagggtttgattgacgaacgtctcgaaaaaagaaggtcgcagtacgaagaggctacggatgtaatcgatatattacttaacactattgaacagaacccagaagaaatcgaccgaactcatatcgagagaatgttcttagatctctttttggctggtacagatacgacatcttcgacggtcgaatgggccatggctgaagccatgaagaacccagaaaccatgaagaaagctaaggcggaattagctcaagttatcggcaaggggaaaatagtccaagaaactgatataccacacctaccatatttgcaatgcatcgtaaaggagacactacgattacacccacctgtacccttccttatcccacgtcgtgttcatgaagacgtggacatattgggttatgtcgttccaaataactcacaagtgttcgttaacatgtgggccattgggagggacccagatatgtggaaaaatccattacaatttgatcccgaccgttttcatgattccgaagtcggtctgagaggtaaagattttgaattgattcccttcggcgctggcagaagaatttgcccaggattacctttggctatgcgtatggtgcctgttgttttaggatctctcttgaactccttcgattggaaggtcgaaggtggtaaagaactggaaatgaatgaaaagtttggtggcggctctggcggaagcacatctagcggtagttccggtggttggagacggtcctccggatctggtaaaaaggttgttgaaccacctaaactaatcgtgccaaaaagtgttgtcgaaccagaggaaatcgatgaaggtaagaaaaagtttactatattttttggcacccagacaggtacggctgagggcttcgcaaaggcactagccgaggaagctaaagctaggtatgaaaaggcagtcattaaggttatcgatatagacgattatgcggctgatgacgaggaatatgaagaaaaatttaggaaggaaacgttagcttttttcattctggctacttacggcgatggtgaaccaacagacaatgcagccagattctacaagtggtttgttgaagggaatgacaggggtgattggttaaaaaatttgcaatacggtgtttttggcctcgggaatcgccagtacgaacatttcaataagatagccaaagtggtagatgagaaggttgcggaacaaggtggcaaacgtatcgtccccttagttttaggcgatgacgatcagtgtattgaagacgatttcgcggcatggcgtgaaaatgtttggcccgaacttgataatcttcttagagacgaagacgatactactgtttcaacaacctacacggccgcaatccccgaatacagagttgttttcccagataagtcagatagcttaatttcagaagcaaatggtcacgctaatggttatgctaatgggaatacggtctacgatgctcaacacccatgcagatctaatgttgcagtccgcaaggagttacacactccagcatcagatcgctcatgtactcatcttgatttcgatatcgctggcaccggattgagctacgggactggagatcatgtaggtgtctattgtgataatttatctgaaaccgtcgaggaagctgagaggttgcttaatctgccgcctgaaacgtattttagcctccacgctgataaggaagacggcacacctttggcaggatcttctttgcctcctccctttccaccttgtacattacggactgctttgactaggtatgcggatttgctgaacacccccaaaaagagcgctttgctggccttagctgcatatgcttccgatcctaatgaagccgatagactaaaatacctagccagtcccgctggcaaggacgagtacgcacaatctcttgtcgctaaccaaagatcgcttttagaggtaatggccgagtttccctctgcaaaaccaccacttggggtttttttcgcggctattgctcctcgtcttcaaccaaggttctattcaatttcctctagtccgcgtatggctcctagtagaatccatgttacatgtgcattagtctacgaaaagactccaggtggtagaattcataagggagtttgttctacttggatgaaaaatgctattccgctggaagaatcacgtgactgctcgtgggcccccatctttgtacgtcaaagtaattttaagcttcctgcagaccctaaggtgccagtgataatgataggtccaggtaccggcttggctcctttcagaggattcttacaggaaaggttagctttgaaggaagaaggcgcagaattgggtactgctgtgttcttctttggttgtcgtaacagaaaaatggactacatttacgaagatgagctaaaccatttcttagaaattggtgccttgtccgaactattagtcgccttcagcagggagggccctacgaagcaatacgttcagcataaaatggctgaaaaagcgtcagacatttggcgaatgataagtgatggtgcctatgtgtatgtgtgcggggatgcaaagggtatggctcgtgatgtccacagaacactacatactatcgcccaagagcaaggctcgatggattctacacaagctgaaggttttgtaaagaatctacaaatgacgggtaggtacctaagagatgtttgg

SEQ ID NO: 1424 - DNA, 3417 bp, Artificial Sequence
  G8H-CPR engineered fusion
atggattttctgacaattttcattggtcctcttctggcaatcattgcattgttctacgctcgcttaacaattagcactcgtggaaagaatctacccccaggtcccactcctttaccatttattggtaatttacacttgctcggtcatcatccccataagtctttggcacgtcttgccaagacttatggtccattgatgttacttagactagggtctgaaaatactgtggtcgtatcttcggctgccgttgctaaagaagtattgcaaaaacatgatttggcctttagttctcgatccatacctgatgcagttcatgcacacgatcaattcaagtactccgtggtttggttgccagttgcctctagatggagatctttaagaaaaactatgaactccaatatcttttcgggctcctgcttagatgccaatcagcatttaagaagtaggaaggttgaagaattaatcgcctattgtaaagaaagctgtaggcgtgctgaagcagtagacgtcgggcgtgctgctttcagaaccgctttaaattctttgtcaaacacaattttttctcgagaccttgctgatccattatccgactctggtaaggaatttaaggacgttgtttcttcgatcatgatggaggcgggcaagccaaacagtgtagactactatccgttcctgtctcgattcgatccccaaggaatccgtagaaggaccgcaatctattttgataaactgattaacatcttcaagggtttgattgacgaacgtctcgaaaaaagaaggtcgcagtacgaagaggctacggatgtaatcgatatattacttaacactattgaacagaacccagaagaaatcgaccgaactcatatcgagagaatgttcttagatctctttttggctggtacagatacgacatcttcgacggtcgaatgggccatggctgaagccatgaagaacccagaaaccatgaagaaagctaaggcggaattagctcaagttatcggcaaggggaaaatagtccaagaaactgatataccacacctaccatatttgcaatgcatcgtaaaggagacactacgattacacccacctgtacccttccttatcccacgtcgtgttcatgaagacgtggacatattgggttatgtcgttccaaataactcacaagtgttcgttaacatgtgggccattgggagggacccagatatgtggaaaaatccattacaatttgatcccgaccgttttcatgattccgaagtcggtctgagaggtaaagattttgaattgattcccttcggcgctggcagaagaatttgcccaggattacctttggctatgcgtatggtgcctgttgttttaggatctctcttgaactccttcgattggaaggtcgaaggtggtaaagaactggaaatgaatgaaaagtttggaataactcttgaaaaagcacaacctttaatggcagtacccatcgcattaggtggcggctctggcggaagcacatctagcggtagttccggtggtcctaaactaatcgtgccaaaaagtgttgtcgaaccagaggaaatcgatgaaggtaagaaaaagtttactatattttttggcacccagacaggtacggctgagggcttcgcaaaggcactagccgaggaagctaaagctaggtatgaaaaggcagtcattaaggttatcgatatagacgattatgcggctgatgacgaggaatatgaagaaaaatttaggaaggaaacgttagcttttttcattctggctacttacggcgatggtgaaccaacagacaatgcagccagattctacaagtggtttgttgaagggaatgacaggggtgattggttaaaaaatttgcaatacggtgtttttggcctcgggaatcgccagtacgaacatttcaataagatagccaaagtggtagatgagaaggttgcggaacaaggtggcaaacgtatcgtccccttagttttaggcgatgacgatcagtgtattgaagacgatttcgcggcatggcgtgaaaatgtttggcccgaacttgataatcttcttagagacgaagacgatactactgtttcaacaacctacacggccgcaatccccgaatacagagttgttttcccagataagtcagatagcttaatttcagaagcaaatggtcacgctaatggttatgctaatgggaatacggtctacgatgctcaacacccatgcagatctaatgttgcagtccgcaaggagttacacactccagcatcagatcgctcatgtactcatcttgatttcgatatcgctggcaccggattgagctacgggactggagatcatgtaggtgtctattgtgataatttatctgaaaccgtcgaggaagctgagaggttgcttaatctgccgcctgaaacgtattttagcctccacgctgataaggaagacggcacacctttggcaggatcttctttgcctcctccctttccaccttgtacattacggactgctttgactaggtatgcggatttgctgaacacccccaaaaagagcgctttgctggccttagctgcatatgcttccgatcctaatgaagccgatagactaaaatacctagccagtcccgctggcaaggacgagtacgcacaatctcttgtcgctaaccaaagatcgcttttagaggtaatggccgagtttccctctgcaaaaccaccacttggggtttttttcgcggctattgctcctcgtcttcaaccaaggttctattcaatttcctctagtccgcgtatggctcctagtagaatccatgttacatgtgcattagtctacgaaaagactccaggtggtagaattcataagggagtttgttctacttggatgaaaaatgctattccgctggaagaatcacgtgactgctcgtgggcccccatctttgtacgtcaaagtaattttaagcttcctgcagaccctaaggtgccagtgataatgataggtccaggtaccggcttggctcctttcagaggattcttacaggaaaggttagctttgaaggaagaaggcgcagaattgggtactgctgtgttcttctttggttgtcgtaacagaaaaatggactacatttacgaagatgagctaaaccatttcttagaaattggtgccttgtccgaactattagtcgccttcagcagggagggccctacgaagcaatacgttcagcataaaatggctgaaaaagcgtcagacatttggcgaatgataagtgatggtgcctatgtgtatgtgtgcggggatgcaaagggtatggctcgtgatgtccacagaacactacatactatcgcccaagagcaaggctcgatggattctacacaagctgaaggttttgtaaagaatctacaaatgacgggtaggtacctaagagatgtttgg

SEQ ID NO: 1425 - DNA, 3351 bp, Artificial Sequence
  G8H-CPR engineered fusion
atggattttctgacaattttcattggtcctcttctggcaatcattgcattgttctacgctcgcttaacaattagcactcgtggaaagaatctacccccaggtcccactcctttaccatttattggtaatttacacttgctcggtcatcatccccataagtctttggcacgtcttgccaagacttatggtccattgatgttacttagactagggtctgaaaatactgtggtcgtatcttcggctgccgttgctaaagaagtattgcaaaaacatgatttggcctttagttctcgatccatacctgatgcagttcatgcacacgatcaattcaagtactccgtggtttggttgccagttgcctctagatggagatctttaagaaaaactatgaactccaatatcttttcgggctcctgcttagatgccaatcagcatttaagaagtaggaaggttgaagaattaatcgcctattgtaaagaaagctgtaggcgtgctgaagcagtagacgtcgggcgtgctgctttcagaaccgctttaaattctttgtcaaacacaattttttctcgagaccttgctgatccattatccgactctggtaaggaatttaaggacgttgtttcttcgatcatgatggaggcgggcaagccaaacagtgtagactactatccgttcctgtctcgattcgatccccaaggaatccgtagaaggaccgcaatctattttgataaactgattaacatcttcaagggtttgattgacgaacgtctcgaaaaaagaaggtcgcagtacgaagaggctacggatgtaatcgatatattacttaacactattgaacagaacccagaagaaatcgaccgaactcatatcgagagaatgttcttagatctctttttggctggtacagatacgacatcttcgacggtcgaatgggccatggctgaagccatgaagaacccagaaaccatgaagaaagctaaggcggaattagctcaagttatcggcaaggggaaaatagtccaagaaactgatataccacacctaccatatttgcaatgcatcgtaaaggagacactacgattacacccacctgtacccttccttatcccacgtcgtgttcatgaagacgtggacatattgggttatgtcgttccaaataactcacaagtgttcgttaacatgtgggccattgggagggacccagatatgtggaaaaatccattacaatttgatcccgaccgttttcatgattccgaagtcggtctgagaggtaaagattttgaattgattcccttcggcgctggcagaagaatttgcccaggattacctttggctatgcgtatggtgcctgttgttttaggatctctcttgaactccttcgattggaaggtcgaaggtggtaaagaactggaaatgaatgaaaagtttggaataactcttgaaaaagcacaacctttaatggcagtacccatcgcattaggtggcggctctggcggaagcacatctagcggtagttccggtggtactatattttttggcacccagacaggtacggctgagggcttcgcaaaggcactagccgaggaagctaaagctaggtatgaaaaggcagtcattaaggttatcgatatagacgattatgcggctgatgacgaggaatatgaagaaaaatttaggaaggaaacgttagcttttttcattctggctacttacggcgatggtgaaccaacagacaatgcagccagattctacaagtggtttgttgaagggaatgacaggggtgattggttaaaaaatttgcaatacggtgtttttggcctcgggaatcgccagtacgaacatttcaataagatagccaaagtggtagatgagaaggttgcggaacaaggtggcaaacgtatcgtccccttagttttaggcgatgacgatcagtgtattgaagacgatttcgcggcatggcgtgaaaatgtttggcccgaacttgataatcttcttagagacgaagacgatactactgtttcaacaacctacacggccgcaatccccgaatacagagttgttttcccagataagtcagatagcttaatttcagaagcaaatggtcacgctaatggttatgctaatgggaatacggtctacgatgctcaacacccatgcagatctaatgttgcagtccgcaaggagttacacactccagcatcagatcgctcatgtactcatcttgatttcgatatcgctggcaccggattgagctacgggactggagatcatgtaggtgtctattgtgataatttatctgaaaccgtcgaggaagctgagaggttgcttaatctgccgcctgaaacgtattttagcctccacgctgataaggaagacggcacacctttggcaggatcttctttgcctcctccctttccaccttgtacattacggactgctttgactaggtatgcggatttgctgaacacccccaaaaagagcgctttgctggccttagctgcatatgcttccgatcctaatgaagccgatagactaaaatacctagccagtcccgctggcaaggacgagtacgcacaatctcttgtcgctaaccaaagatcgcttttagaggtaatggccgagtttccctctgcaaaaccaccacttggggtttttttcgcggctattgctcctcgtcttcaaccaaggttctattcaatttcctctagtccgcgtatggctcctagtagaatccatgttacatgtgcattagtctacgaaaagactccaggtggtagaattcataagggagtttgttctacttggatgaaaaatgctattccgctggaagaatcacgtgactgctcgtgggcccccatctttgtacgtcaaagtaattttaagcttcctgcagaccctaaggtgccagtgataatgataggtccaggtaccggcttggctcctttcagaggattcttacaggaaaggttagctttgaaggaagaaggcgcagaattgggtactgctgtgttcttctttggttgtcgtaacagaaaaatggactacatttacgaagatgagctaaaccatttcttagaaattggtgccttgtccgaactattagtcgccttcagcagggagggccctacgaagcaatacgttcagcataaaatggctgaaaaagcgtcagacatttggcgaatgataagtgatggtgcctatgtgtatgtgtgcggggatgcaaagggtatggctcgtgatgtccacagaacactacatactatcgcccaagagcaaggctcgatggattctacacaagctgaaggttttgtaaagaatctacaaatgacgggtaggtacctaagagatgtttgg

SEQ ID NO: 1426 - DNA, 3453 bp, Artificial Sequence
  G8H-CPR engineered fusion
atggacttcctgactattgtgcttggcctcctgttcacacttgtgctcgttcacggactccagactctttctgctagggccaagaaactccctcctgggcccacgcctctaccacttatcggctctctgcacctcctgggcgaccagcctcaccaatctcttgctaagcttgcgaagactcacgggcccctcatgtgtctccgcttgggatttattaacacggtcgttgtatcgtcggcagcaatggcgaaggaggttctccaaaaacaggatctcgtcttcagcagtagaaccataccggatgctattcacgcacacgaccagtttaagtactctgttgtctggttgcccgtcgcttcacgatggcgtagtctgcgtaaggtgctcaactcgaacatcttctctggctcccgtctggacgccaaccagcacctacgatgccgtaaggtgcaggagctcatcgcctattgcaggaagaattcacagaccggtgagccagtggacgtgggacgagccgcgttccgaacctcccttaacctcctttctaacaccatcttttcgaaggatctgacagaccctttttctgactctgccaaggaatttaaggacctcgtgtggaacattatggtcgaggctggaaagccaaacctggtcgatttctttccaatgctcgaaaagcttgatccccagggcatacgaagacgaatgaccattcatttcggaaaggtgatcgatctgtttagtggtcttatcaacgaacggctggaaaagggtaagactcagaacgctggtaactccgatgttatcgacatcctcttggcaacttctaaggaaaacccagaggagattgaccgagttcacatcgaacgtatgtgcctggatttgtttgtagctggcaccgacaccacatcgtctacgctggagtgggcaatggccgaggccctgaagaaccccgagacggtcaagaaggctaaggcggagctcgaagaggtgatcggtaagggcaaggtcctcgacgaggctgacatttcacgtttgccctacctacgctgcatggtgaaggagacgctaagaatccacccccctgtaccattcttgattccccgaagggtggaccaggatgtggaggtttgtggttacaccgttcccaagaactctcaggtcttcgtgaatgcctgggccattggtcgggaccccgatgtctggaaggaccccctcgaattcaagcccgagcgattcttggagtccgaactcgacatgcgaggacgagacttcgagctgattccctttggtgcaggacggcggatttgtccgggtttgcccctcgccgtgcgaatggtccccgtgatgctcggttcgctgctgaatagcttcgactggaaactggaaaacggcatcggtcccaaggaactggatatggatgaaaagttcggcatcaccctccagaaggctagacccctcagagctgtgcctcttcctctcggtggcggctctggcggaagcacatctagcggtagttccggtggttggaagaaaaccacagctgatcgctcaggcgagttaaaaccattaatgattcccaaatcactgatggcaaaggatgaagacgatgatttggacctagggtcaggtaagacaagggtgtccatcttctttggaactcaaacgggtactgctgaggggttcgcaaaggctctatcggaagaaataaaagctaggtacgaaaaagcagccgtcaaagacgattacgccgctgatgatgaccaatacgaagaaaaattgaaaaaagaaacattagccttcttctgcgtcgcaacttatggtgacggcgaaccaacagataatgcggctagattctacaaatggttcacggaagagaatgagagagatattaaattgcaacaactggcttacggtgtttttgcacttggaaacaggcagtacgaacattttaacaagattggaattgttttggatgaggagttgtgtaaaaagggagctaagagattgatagaagtgggcttgggagatgatgatcagtcaattgaggatgatttcaacgcatggaaggaaagcttgtggtctgagttggataagctccttaaggatgaagatgataaatcggtcgcgaccccttatactgctgtcataccggaatacagggtggtaactcatgaccctaggtttactacacagaagagtatggaatccaatgtggcgaatggtaacaccacaattgatatccatcatccatgtagagttgatgtggctgtccagaaagaattgcatacccatgaatcggacaggtcatgtattcatttggaattcgacatttcacgtacaggtattacttatgaaactggcgatcacgtgggcgtctacgctgagaatcacgtcgaaattgttgaggaagcaggaaaattgctgggacattcactagaccttgttttttcgatacatgcagataaggaagatggaagtccgttggaatctgcagtccctcctcctttcccaggaccatgtaccttgggtactggtttggccagatatgcagatctccttaatcctccccggaaaagcgcattggtggctttggctgcctatgcaactgaaccttcagaagctgaaaaacttaaacatctaacatccccagatggaaaggacgaatatagtcagtggatcgtggcgagtcaacgctcacttttagaagttatggcggcatttccaagcgctaaaccaccactgggtgttttctttgccgcaatagctcctagattacaacccagatattactctatctcatcctctccacgattagctccttctagagttcacgtcacttctgctttggtctacggtccaacgccaacaggtcgaattcataaaggtgtatgcagtacatggatgaagaatgctgttcctgctgagaaatcgcacgaatgttccggtgcccctatttttatcagagccagcaacttcaaattgccatctaatccgtctactcccattgttatggtaggtccgggtactggccttgccccgttcagaggttttttgcaagagcgaatggccttgaaggaagacggggaagagttaggttcttccctattatttttcggctgccggaatcgacaaatggactttatttatgaagatgaattgaacaactttgtggatcaaggagttatttccgaattgattatggcgttctctagagaaggtgcacaaaaagaatacgtccaacataaaatgatggaaaaggcagctcaagtatgggatctaattaaagaagaaggatatttatacgtatgtggggatgcaaaaggtatggccagagatgttcataggactttgcacactatcgtccaagaacaagaaggtgtctcatctagtgaagctgaagcgattgttaaaaaattacaaacagaaggcagatatttgagggatgtttgg

SEQ ID NO: 1427 - DNA, 3465 bp, Artificial Sequence
  G8H-CPR engineered fusion
atggacttcctgactattgtgcttggcctcctgttcacacttgtgctcgttcacggactccagactctttctgctagggccaagaaactccctcctgggcccacgcctctaccacttatcggctctctgcacctcctgggcgaccagcctcaccaatctcttgctaagcttgcgaagactcacgggcccctcatgtgtctccgcttgggatttattaacacggtcgttgtatcgtcggcagcaatggcgaaggaggttctccaaaaacaggatctcgtcttcagcagtagaaccataccggatgctattcacgcacacgaccagtttaagtactctgttgtctggttgcccgtcgcttcacgatggcgtagtctgcgtaaggtgctcaactcgaacatcttctctggctcccgtctggacgccaaccagcacctacgatgccgtaaggtgcaggagctcatcgcctattgcaggaagaattcacagaccggtgagccagtggacgtgggacgagccgcgttccgaacctcccttaacctcctttctaacaccatcttttcgaaggatctgacagaccctttttctgactctgccaaggaatttaaggacctcgtgtggaacattatggtcgaggctggaaagccaaacctggtcgatttctttccaatgctcgaaaagcttgatccccagggcatacgaagacgaatgaccattcatttcggaaaggtgatcgatctgtttagtggtcttatcaacgaacggctggaaaagggtaagactcagaacgctggtaactccgatgttatcgacatcctcttggcaacttctaaggaaaacccagaggagattgaccgagttcacatcgaacgtatgtgcctggatttgtttgtagctggcaccgacaccacatcgtctacgctggagtgggcaatggccgaggccctgaagaaccccgagacggtcaagaaggctaaggcggagctcgaagaggtgatcggtaagggcaaggtcctcgacgaggctgacatttcacgtttgccctacctacgctgcatggtgaaggagacgctaagaatccacccccctgtaccattcttgattccccgaagggtggaccaggatgtggaggtttgtggttacaccgttcccaagaactctcaggtcttcgtgaatgcctgggccattggtcgggaccccgatgtctggaaggaccccctcgaattcaagcccgagcgattcttggagtccgaactcgacatgcgaggacgagacttcgagctgattccctttggtgcaggacggcggatttgtccgggtttgcccctcgccgtgcgaatggtccccgtgatgctcggttcgctgctgaatagcttcgactggaaactggaaaacggcatcggtcccaaggaactggatatggatgaaaagttcggcatcaccctccagaaggctagacccctcagagctgtgcctcttcctctcggtggcggctctggcggaagcacatctagcggtagttccggtggttggagacgctcgtcagatagatctaaagaaagcaacccagttgttgtacctagacctttactggtagaagctgaagaagatgaggtggaagtcggttctggaaaaacaaaattgacaattttctacggtacacagaccggtactgcggaaggtttcgctaaggctctagcagaagagatcaaggctcgttacgaaaaagccgttgtaaaagtcgtcgacctagatgactatgccgacgatgacgaacaatatgaggaaaagttgaaaaaggaaacgctggctttctttatggttgctacttatggggacggtgaaccgacagacaatgccgctagattctataagtggtttaccgacggcaaagaaagaggtttgtggttacagcaattgaaatttggtgtgtttggtctaggtaatagacagtatgagcattttaataagatagggaaggttttagaccaggatttaagtgaacaagggggtaaacgattgattccagtaggactaggagatgatgaccagtgcattgaagacgattttgccgcctggcgggaacttttgtggcctgaattagatcagttgcttagggatggtgacgacactaacaccgtgagtaccccctatactgccgtcatccctgagtacagagtcgtcatatacgatccgacaactacctcattcgaagacaagcatctatcaatggcaaatgggaatgcctcttacgacatccaccacccatgtcgcgttaatgtagctgttcaaagagaactgcataagccagagtctgatcgatcatgtatccatttggaattcgatatatcctctacagggatcacatatgagaccggtgatcatgtaggcgtgtacgccgacaactgtgatgaaactgtagaagaagctgcccgattgttgggccagcctttggatctacttttttccattcattccgacgacgataacggtactcccctaggtggtagtctgccgccaccttttccaggcccttgtaccttaaggacagctttggctagatatgccgacttattgaatccaccacgaaaagctgcccttattgcccttgcagcccatgccattgaaccatcagaatcggaaaaattaaaattcttgagttcgccacaaggaaaagacgattactctcaatgggtcgttgggtctcaacgtagtctattggaagttatggctgaatttcccagcgcaaagccaccattgggtgttttcttcgccgcagttgctactagattacagccaagatattattcaattagcagttctcctagatttgcaccttctagagttcatgttacttgctctttagtttacggtcccacatcaaccggacgtattcacaaaggagtttgttcaacctggatgaagaatgctgtaccattagaaaagtcacgcaactgttcatgggccccaatttttattcgtgcttcaaacttcaaattacctagcaacccaagtattcctatagtgatggttggtccaggcactggcttagcacctttcagaggcttcttacaagagagattggccctgaaggaagacggtattcaattgggtccagccttgcttttttttggttgcagaaatagaaggatggattttatatatgaggacgagttaaataacttcgtggaccgcggtgttcttagtgacttaattgtcgcctttagtagagagggtccgcagaaagaatatgttcaacacaagatgatggaaaaagcggcttacatttggaatctaatttctcaggaaggctatctatatgtatgcggcgatgccaagggaatggctcgagatgttcatagaactcttcataccattgtccaagaacaagaaaatgctgatacttcaaaggccgaatcggttgtgaaaaaacttcaaatggacgggcgctatttgagagatgtgtgg

SEQ ID NO: 1428 - DNA, 3465 bp, Artificial Sequence
  G8H-CPR engineered fusion
atggacttcctgactattgtgcttggcctcctgttcacacttgtgctcgttcacggactccagactctttctgctagggccaagaaactccctcctgggcccacgcctctaccacttatcggctctctgcacctcctgggcgaccagcctcaccaatctcttgctaagcttgcgaagactcacgggcccctcatgtgtctccgcttgggatttattaacacggtcgttgtatcgtcggcagcaatggcgaaggaggttctccaaaaacaggatctcgtcttcagcagtagaaccataccggatgctattcacgcacacgaccagtttaagtactctgttgtctggttgcccgtcgcttcacgatggcgtagtctgcgtaaggtgctcaactcgaacatcttctctggctcccgtctggacgccaaccagcacctacgatgccgtaaggtgcaggagctcatcgcctattgcaggaagaattcacagaccggtgagccagtggacgtgggacgagccgcgttccgaacctcccttaacctcctttctaacaccatcttttcgaaggatctgacagaccctttttctgactctgccaaggaatttaaggacctcgtgtggaacattatggtcgaggctggaaagccaaacctggtcgatttctttccaatgctcgaaaagcttgatccccagggcatacgaagacgaatgaccattcatttcggaaaggtgatcgatctgtttagtggtcttatcaacgaacggctggaaaagggtaagactcagaacgctggtaactccgatgttatcgacatcctcttggcaacttctaaggaaaacccagaggagattgaccgagttcacatcgaacgtatgtgcctggatttgtttgtagctggcaccgacaccacatcgtctacgctggagtgggcaatggccgaggccctgaagaaccccgagacggtcaagaaggctaaggcggagctcgaagaggtgatcggtaagggcaaggtcctcgacgaggctgacatttcacgtttgccctacctacgctgcatggtgaaggagacgctaagaatccacccccctgtaccattcttgattccccgaagggtggaccaggatgtggaggtttgtggttacaccgttcccaagaactctcaggtcttcgtgaatgcctgggccattggtcgggaccccgatgtctggaaggaccccctcgaattcaagcccgagcgattcttggagtccgaactcgacatgcgaggacgagacttcgagctgattccctttggtgcaggacggcggatttgtccgggtttgcccctcgccgtgcgaatggtccccgtgatgctcggttcgctgctgaatagcttcgactggaaactggaaaacggcatcggtcccaaggaactggatatggatgaaaagttcggcatcaccctccagaaggctagacccctcagagctgtgcctcttcctctcggtggcggctctggcggaagcacatctagcggtagttccggtggttggcgaaagggtgccggttctgcaaagaaagttgtcgaacctccaaaactagttttaccaaaagctctctcagaaaccgaggaggtggacgacggaaaaaagaaggtcactattttttttggtacccaaactggtactgcagaaggttttgcgaaagctcttgcagaagaagccaaagcgagatatccacaagctaatttcaaagtcgtggatatggatgactatgcagcggaggacgaagagtacgaagagaaattgaccaaagagactatggctttttttttccttgcaacctacggtgatggtgagccaactgacaatgctgcacgcttttacaagtggttcgccgaaggtaaggaacgaggtgattcatttaaaaatttacattatggtgtgtttggtttgggaaatagacaatatgagcatttcaacaaaattgctatcgtagttgacaacattttggccgagcaaggcgggaaaagattggttcctgtaggtttaggggatgatgaccagtgtatcgaagacgatttcgcagcatggagagaaaatgtttggccggagcttgacaatttgttacgaaatgaggacgatgcaagtacagtatcgactccctatactgcagcggtgttggagtacagggtggagttccacgaccaaagtgacgagttatctttggagaactctctcgccaacggtcatgctaacggtaatgcctcatatgacgctcagcacccttgtagagcaaatgttgccgttaaaagagaattgcatacaccattatccgatagatcatgtacccaccttgaatttgacatatcaggcacaggcttacaatatgaaaccggtgatcatgtaggcgtttattgtgagaatctaattgagactgtcgaagaagctgaaagactgttgggtttgagcccacagacttattttagtgttcacaccgacaaagaagatggaactccccttggtggtagcgcacttcctccacctttcccaccctgtactttaaggacggccttatctcgatatgcggatttgttgaatgcccctaaaaagagtgcactgacagctcttgctgcttacgcgagtgaccctacggaagctgacagattaaaacacctagcttcacctgccggaaaggaagaatatgcccaatatgttgtggcttcccaaaggaccctactagaagtaatggccgatttcccatcggcaaagccacctctaggtgtgtttttcgcgggtgtcgccccaagattgcagcctagattttattccatttcttcttccccaaagattgctcccttcaggattcatgtaacctgcgctttggtgtatgacaaaactccaactggaagaatccataaaggtatctgttctacgtggataaagaatgctgtacctttggaggagagctcggattgttcgtcagctcctatctttgttcggaatagcaattttaaattaccatctgacgcaaacataccaattatcatgatcggtccaggcactgggctagcaccattcaggggttttttacaagaacgcctggctttaaaagagtccggtgcagaactgggcccagccattttgttctttggatgtcgtaacaggaaaatggacttcatatatgaagatgaactgaacgattttgtaaaggctggtgttgtgagtgagttgattgttgcctttagcagagaaggatcaactaaagaatacgttcaacacaagatggcacaacgtgcatctgacgtatggaaaatgatcagcgatggaggttacatttacgtctgcggcgacgcaaagggtatggctagagatgtacataggactttgcacaccatcgcccaagaacaaggctcaatgtcctcatccgaagccgagggtatggtaaaaaatttacaaatgacaggaaggtatctccgtgacgtctgg

SEQ ID NO: 1429 - DNA, 3465 bp, Artificial Sequence
  G8H-CPR engineered fusion
atggacttcctgactattgtgcttggcctcctgttcacacttgtgctcgttcacggactccagactctttctgctagggccaagaaactccctcctgggcccacgcctctaccacttatcggctctctgcacctcctgggcgaccagcctcaccaatctcttgctaagcttgcgaagactcacgggcccctcatgtgtctccgcttgggatttattaacacggtcgttgtatcgtcggcagcaatggcgaaggaggttctccaaaaacaggatctcgtcttcagcagtagaaccataccggatgctattcacgcacacgaccagtttaagtactctgttgtctggttgcccgtcgcttcacgatggcgtagtctgcgtaaggtgctcaactcgaacatcttctctggctcccgtctggacgccaaccagcacctacgatgccgtaaggtgcaggagctcatcgcctattgcaggaagaattcacagaccggtgagccagtggacgtgggacgagccgcgttccgaacctcccttaacctcctttctaacaccatcttttcgaaggatctgacagaccctttttctgactctgccaaggaatttaaggacctcgtgtggaacattatggtcgaggctggaaagccaaacctggtcgatttctttccaatgctcgaaaagcttgatccccagggcatacgaagacgaatgaccattcatttcggaaaggtgatcgatctgtttagtggtcttatcaacgaacggctggaaaagggtaagactcagaacgctggtaactccgatgttatcgacatcctcttggcaacttctaaggaaaacccagaggagattgaccgagttcacatcgaacgtatgtgcctggatttgtttgtagctggcaccgacaccacatcgtctacgctggagtgggcaatggccgaggccctgaagaaccccgagacggtcaagaaggctaaggcggagctcgaagaggtgatcggtaagggcaaggtcctcgacgaggctgacatttcacgtttgccctacctacgctgcatggtgaaggagacgctaagaatccacccccctgtaccattcttgattccccgaagggtggaccaggatgtggaggtttgtggttacaccgttcccaagaactctcaggtcttcgtgaatgcctgggccattggtcgggaccccgatgtctggaaggaccccctcgaattcaagcccgagcgattcttggagtccgaactcgacatgcgaggacgagacttcgagctgattccctttggtgcaggacggcggatttgtccgggtttgcccctcgccgtgcgaatggtccccgtgatgctcggttcgctgctgaatagcttcgactggaaactggaaaacggcatcggtcccaaggaactggatatggatgaaaagttcggcatcaccctccagaaggctagacccctcagagctgtgcctcttcctctcggtggcggctctggcggaagcacatctagcggtagttccggtggttggagacggtcctccggatctggtaaaaaggttgttgaaccacctaaactaatcgtgccaaaaagtgttgtcgaaccagaggaaatcgatgaaggtaagaaaaagtttactatattttttggcacccagacaggtacggctgagggcttcgcaaaggcactagccgaggaagctaaagctaggtatgaaaaggcagtcattaaggttatcgatatagacgattatgcggctgatgacgaggaatatgaagaaaaatttaggaaggaaacgttagcttttttcattctggctacttacggcgatggtgaaccaacagacaatgcagccagattctacaagtggtttgttgaagggaatgacaggggtgattggttaaaaaatttgcaatacggtgtttttggcctcgggaatcgccagtacgaacatttcaataagatagccaaagtggtagatgagaaggttgcggaacaaggtggcaaacgtatcgtccccttagttttaggcgatgacgatcagtgtattgaagacgatttcgcggcatggcgtgaaaatgtttggcccgaacttgataatcttcttagagacgaagacgatactactgtttcaacaacctacacggccgcaatccccgaatacagagttgttttcccagataagtcagatagcttaatttcagaagcaaatggtcacgctaatggttatgctaatgggaatacggtctacgatgctcaacacccatgcagatctaatgttgcagtccgcaaggagttacacactccagcatcagatcgctcatgtactcatcttgatttcgatatcgctggcaccggattgagctacgggactggagatcatgtaggtgtctattgtgataatttatctgaaaccgtcgaggaagctgagaggttgcttaatctgccgcctgaaacgtattttagcctccacgctgataaggaagacggcacacctttggcaggatcttctttgcctcctccctttccaccttgtacattacggactgctttgactaggtatgcggatttgctgaacacccccaaaaagagcgctttgctggccttagctgcatatgcttccgatcctaatgaagccgatagactaaaatacctagccagtcccgctggcaaggacgagtacgcacaatctcttgtcgctaaccaaagatcgcttttagaggtaatggccgagtttccctctgcaaaaccaccacttggggtttttttcgcggctattgctcctcgtcttcaaccaaggttctattcaatttcctctagtccgcgtatggctcctagtagaatccatgttacatgtgcattagtctacgaaaagactccaggtggtagaattcataagggagtttgttctacttggatgaaaaatgctattccgctggaagaatcacgtgactgctcgtgggcccccatctttgtacgtcaaagtaattttaagcttcctgcagaccctaaggtgccagtgataatgataggtccaggtaccggcttggctcctttcagaggattcttacaggaaaggttagctttgaaggaagaaggcgcagaattgggtactgctgtgttcttctttggttgtcgtaacagaaaaatggactacatttacgaagatgagctaaaccatttcttagaaattggtgccttgtccgaactattagtcgccttcagcagggagggccctacgaagcaatacgttcagcataaaatggctgaaaaagcgtcagacatttggcgaatgataagtgatggtgcctatgtgtatgtgtgcggggatgcaaagggtatggctcgtgatgtccacagaacactacatactatcgcccaagagcaaggctcgatggattctacacaagctgaaggttttgtaaagaatctacaaatgacgggtaggtacctaagagatgtttgg

SEQ ID NO: 1430 - DNA, 3450 bp, Artificial Sequence
  G8H-CPR engineered fusion
atggactacctgaccattgcactcggttttctgttcgccctaaccctgtaccaggccttgatttctttctcccggaagtctaagaacctaccccctggtccggcaccacttccctttattggaaatcttcacctgctgggtgaccagccacacaagtctcttgcaaagctagcgaagaagcacggacccatcatgggcctccagttcggacaagtgacaaccattgtcgttacaagctccggcatggccaaggaggtccttcagaagcaggacctggctttttcgtcgcgatccgtgcccaacgcacttcacgctcacgatcaatacaaatacagcgtcatttggcttcccgtggccagccaatggaggtccctccggaaagtgctgaactctaacatcttctcgggaaatcggctggacgcaaaccagcatctaagatgccgcaaggttcaagagctcattgcttactgccgaaagaactgccagacaggcgaagccgtcgatcttggtcgggcggcctttcgaactagtctgaacctcctgtcgaataccatctttagcaaggatctcaccgatccttacagtgatagcgctaaggaatttaaagatctggtttggaatgtgatggtggaggctggcaagcccaatctcgtcgacttcttccccgttctggacaaggttgaccctcagggaattagaaagcgaatgactttccacttcggtaaaatcctccagctgttcggtggcctcatcaatgagaggttgcagcagaacaaggcgaagggcgctcacaaagacgtgctcgatgtgctgcttaagacctcgcaggagactcccgacgagctcaaccgaacccatatcgaacgaatgtgtctcgacctctttgtggctggaactgataccacttcctccaccctggagtgggctatggcggagatgctgaagagcccggacaaaatgaacaaggccaaggaggagctggcacaggtgatcgggaaaggcaaggccgttgaagaggccgatatcgcgagcctcccatacctccggtgcgccataaaggaaacgctgagaatccaccctcccgtgcctttcttaatccctcgacggactgagcaggaggtcgaggtttgtggatacactgtacctaaaaactcccaggtgtttgtcaacgtctgggctatcggccgagatgagaccacgtggcctgacgccctagagttcaagcccgagcgttttctggaaagtgaaattgacatgcggggtcgggacttcgagcttctgccctttggcgccggtcgacgaatctgccccggcttcccattggcggtgagaatggtgccggtcatgcttgggtcactgctaaattccttcgactggaagcttgagggtggaattgcccccaaggatctcgacatggaggagaaattcggtattacgctacaaaaggctcatccccttcgagctattcccacctccttgggtggcggctctggcggaagcacatctagcggtagttccggtggttggaagaaaaccacagctgatcgctcaggcgagttaaaaccattaatgattcccaaatcactgatggcaaaggatgaagacgatgatttggacctagggtcaggtaagacaagggtgtccatcttctttggaactcaaacgggtactgctgaggggttcgcaaaggctctatcggaagaaataaaagctaggtacgaaaaagcagccgtcaaagacgattacgccgctgatgatgaccaatacgaagaaaaattgaaaaaagaaacattagccttcttctgcgtcgcaacttatggtgacggcgaaccaacagataatgcggctagattctacaaatggttcacggaagagaatgagagagatattaaattgcaacaactggcttacggtgtttttgcacttggaaacaggcagtacgaacattttaacaagattggaattgttttggatgaggagttgtgtaaaaagggagctaagagattgatagaagtgggcttgggagatgatgatcagtcaattgaggatgatttcaacgcatggaaggaaagcttgtggtctgagttggataagctccttaaggatgaagatgataaatcggtcgcgaccccttatactgctgtcataccggaatacagggtggtaactcatgaccctaggtttactacacagaagagtatggaatccaatgtggcgaatggtaacaccacaattgatatccatcatccatgtagagttgatgtggctgtccagaaagaattgcatacccatgaatcggacaggtcatgtattcatttggaattcgacatttcacgtacaggtattacttatgaaactggcgatcacgtgggcgtctacgctgagaatcacgtcgaaattgttgaggaagcaggaaaattgctgggacattcactagaccttgttttttcgatacatgcagataaggaagatggaagtccgttggaatctgcagtccctcctcctttcccaggaccatgtaccttgggtactggtttggccagatatgcagatctccttaatcctccccggaaaagcgcattggtggctttggctgcctatgcaactgaaccttcagaagctgaaaaacttaaacatctaacatccccagatggaaaggacgaatatagtcagtggatcgtggcgagtcaacgctcacttttagaagttatggcggcatttccaagcgctaaaccaccactgggtgttttctttgccgcaatagctcctagattacaacccagatattactctatctcatcctctccacgattagctccttctagagttcacgtcacttctgctttggtctacggtccaacgccaacaggtcgaattcataaaggtgtatgcagtacatggatgaagaatgctgttcctgctgagaaatcgcacgaatgttccggtgcccctatttttatcagagccagcaacttcaaattgccatctaatccgtctactcccattgttatggtaggtccgggtactggccttgccccgttcagaggttttttgcaagagcgaatggccttgaaggaagacggggaagagttaggttcttccctattatttttcggctgccggaatcgacaaatggactttatttatgaagatgaattgaacaactttgtggatcaaggagttatttccgaattgattatggcgttctctagagaaggtgcacaaaaagaatacgtccaacataaaatgatggaaaaggcagctcaagtatgggatctaattaaagaagaaggatatttatacgtatgtggggatgcaaaaggtatggccagagatgttcataggactttgcacactatcgtccaagaacaagaaggtgtctcatctagtgaagctgaagcgattgttaaaaaattacaaacagaaggcagatatttgagggatgtttgg

SEQ ID NO: 1431 - DNA, 3462 bp, Artificial Sequence
  G8H-CPR engineered fusion
atggactacctgaccattgcactcggttttctgttcgccctaaccctgtaccaggccttgatttctttctcccggaagtctaagaacctaccccctggtccggcaccacttccctttattggaaatcttcacctgctgggtgaccagccacacaagtctcttgcaaagctagcgaagaagcacggacccatcatgggcctccagttcggacaagtgacaaccattgtcgttacaagctccggcatggccaaggaggtccttcagaagcaggacctggctttttcgtcgcgatccgtgcccaacgcacttcacgctcacgatcaatacaaatacagcgtcatttggcttcccgtggccagccaatggaggtccctccggaaagtgctgaactctaacatcttctcgggaaatcggctggacgcaaaccagcatctaagatgccgcaaggttcaagagctcattgcttactgccgaaagaactgccagacaggcgaagccgtcgatcttggtcgggcggcctttcgaactagtctgaacctcctgtcgaataccatctttagcaaggatctcaccgatccttacagtgatagcgctaaggaatttaaagatctggtttggaatgtgatggtggaggctggcaagcccaatctcgtcgacttcttccccgttctggacaaggttgaccctcagggaattagaaagcgaatgactttccacttcggtaaaatcctccagctgttcggtggcctcatcaatgagaggttgcagcagaacaaggcgaagggcgctcacaaagacgtgctcgatgtgctgcttaagacctcgcaggagactcccgacgagctcaaccgaacccatatcgaacgaatgtgtctcgacctctttgtggctggaactgataccacttcctccaccctggagtgggctatggcggagatgctgaagagcccggacaaaatgaacaaggccaaggaggagctggcacaggtgatcgggaaaggcaaggccgttgaagaggccgatatcgcgagcctcccatacctccggtgcgccataaaggaaacgctgagaatccaccctcccgtgcctttcttaatccctcgacggactgagcaggaggtcgaggtttgtggatacactgtacctaaaaactcccaggtgtttgtcaacgtctgggctatcggccgagatgagaccacgtggcctgacgccctagagttcaagcccgagcgttttctggaaagtgaaattgacatgcggggtcgggacttcgagcttctgccctttggcgccggtcgacgaatctgccccggcttcccattggcggtgagaatggtgccggtcatgcttgggtcactgctaaattccttcgactggaagcttgagggtggaattgcccccaaggatctcgacatggaggagaaattcggtattacgctacaaaaggctcatccccttcgagctattcccacctccttgggtggcggctctggcggaagcacatctagcggtagttccggtggttggagacgctcgtcagatagatctaaagaaagcaacccagttgttgtacctagacctttactggtagaagctgaagaagatgaggtggaagtcggttctggaaaaacaaaattgacaattttctacggtacacagaccggtactgcggaaggtttcgctaaggctctagcagaagagatcaaggctcgttacgaaaaagccgttgtaaaagtcgtcgacctagatgactatgccgacgatgacgaacaatatgaggaaaagttgaaaaaggaaacgctggctttctttatggttgctacttatggggacggtgaaccgacagacaatgccgctagattctataagtggtttaccgacggcaaagaaagaggtttgtggttacagcaattgaaatttggtgtgtttggtctaggtaatagacagtatgagcattttaataagatagggaaggttttagaccaggatttaagtgaacaagggggtaaacgattgattccagtaggactaggagatgatgaccagtgcattgaagacgattttgccgcctggcgggaacttttgtggcctgaattagatcagttgcttagggatggtgacgacactaacaccgtgagtaccccctatactgccgtcatccctgagtacagagtcgtcatatacgatccgacaactacctcattcgaagacaagcatctatcaatggcaaatgggaatgcctcttacgacatccaccacccatgtcgcgttaatgtagctgttcaaagagaactgcataagccagagtctgatcgatcatgtatccatttggaattcgatatatcctctacagggatcacatatgagaccggtgatcatgtaggcgtgtacgccgacaactgtgatgaaactgtagaagaagctgcccgattgttgggccagcctttggatctacttttttccattcattccgacgacgataacggtactcccctaggtggtagtctgccgccaccttttccaggcccttgtaccttaaggacagctttggctagatatgccgacttattgaatccaccacgaaaagctgcccttattgcccttgcagcccatgccattgaaccatcagaatcggaaaaattaaaattcttgagttcgccacaaggaaaagacgattactctcaatgggtcgttgggtctcaacgtagtctattggaagttatggctgaatttcccagcgcaaagccaccattgggtgttttcttcgccgcagttgctactagattacagccaagatattattcaattagcagttctcctagatttgcaccttctagagttcatgttacttgctctttagtttacggtcccacatcaaccggacgtattcacaaaggagtttgttcaacctggatgaagaatgctgtaccattagaaaagtcacgcaactgttcatgggccccaatttttattcgtgcttcaaacttcaaattacctagcaacccaagtattcctatagtgatggttggtccaggcactggcttagcacctttcagaggcttcttacaagagagattggccctgaaggaagacggtattcaattgggtccagccttgcttttttttggttgcagaaatagaaggatggattttatatatgaggacgagttaaataacttcgtggaccgcggtgttcttagtgacttaattgtcgcctttagtagagagggtccgcagaaagaatatgttcaacacaagatgatggaaaaagcggcttacatttggaatctaatttctcaggaaggctatctatatgtatgcggcgatgccaagggaatggctcgagatgttcatagaactcttcataccattgtccaagaacaagaaaatgctgatacttcaaaggccgaatcggttgtgaaaaaacttcaaatggacgggcgctatttgagagatgtgtgg

SEQ ID NO: 1432 - DNA, 3462 bp, Artificial Sequence
  G8H-CPR engineered fusion
atggactacctgaccattgcactcggttttctgttcgccctaaccctgtaccaggccttgatttctttctcccggaagtctaagaacctaccccctggtccggcaccacttccctttattggaaatcttcacctgctgggtgaccagccacacaagtctcttgcaaagctagcgaagaagcacggacccatcatgggcctccagttcggacaagtgacaaccattgtcgttacaagctccggcatggccaaggaggtccttcagaagcaggacctggctttttcgtcgcgatccgtgcccaacgcacttcacgctcacgatcaatacaaatacagcgtcatttggcttcccgtggccagccaatggaggtccctccggaaagtgctgaactctaacatcttctcgggaaatcggctggacgcaaaccagcatctaagatgccgcaaggttcaagagctcattgcttactgccgaaagaactgccagacaggcgaagccgtcgatcttggtcgggcggcctttcgaactagtctgaacctcctgtcgaataccatctttagcaaggatctcaccgatccttacagtgatagcgctaaggaatttaaagatctggtttggaatgtgatggtggaggctggcaagcccaatctcgtcgacttcttccccgttctggacaaggttgaccctcagggaattagaaagcgaatgactttccacttcggtaaaatcctccagctgttcggtggcctcatcaatgagaggttgcagcagaacaaggcgaagggcgctcacaaagacgtgctcgatgtgctgcttaagacctcgcaggagactcccgacgagctcaaccgaacccatatcgaacgaatgtgtctcgacctctttgtggctggaactgataccacttcctccaccctggagtgggctatggcggagatgctgaagagcccggacaaaatgaacaaggccaaggaggagctggcacaggtgatcgggaaaggcaaggccgttgaagaggccgatatcgcgagcctcccatacctccggtgcgccataaaggaaacgctgagaatccaccctcccgtgcctttcttaatccctcgacggactgagcaggaggtcgaggtttgtggatacactgtacctaaaaactcccaggtgtttgtcaacgtctgggctatcggccgagatgagaccacgtggcctgacgccctagagttcaagcccgagcgttttctggaaagtgaaattgacatgcggggtcgggacttcgagcttctgccctttggcgccggtcgacgaatctgccccggcttcccattggcggtgagaatggtgccggtcatgcttgggtcactgctaaattccttcgactggaagcttgagggtggaattgcccccaaggatctcgacatggaggagaaattcggtattacgctacaaaaggctcatccccttcgagctattcccacctccttgggtggcggctctggcggaagcacatctagcggtagttccggtggttggcgaaagggtgccggttctgcaaagaaagttgtcgaacctccaaaactagttttaccaaaagctctctcagaaaccgaggaggtggacgacggaaaaaagaaggtcactattttttttggtacccaaactggtactgcagaaggttttgcgaaagctcttgcagaagaagccaaagcgagatatccacaagctaatttcaaagtcgtggatatggatgactatgcagcggaggacgaagagtacgaagagaaattgaccaaagagactatggctttttttttccttgcaacctacggtgatggtgagccaactgacaatgctgcacgcttttacaagtggttcgccgaaggtaaggaacgaggtgattcatttaaaaatttacattatggtgtgtttggtttgggaaatagacaatatgagcatttcaacaaaattgctatcgtagttgacaacattttggccgagcaaggcgggaaaagattggttcctgtaggtttaggggatgatgaccagtgtatcgaagacgatttcgcagcatggagagaaaatgtttggccggagcttgacaatttgttacgaaatgaggacgatgcaagtacagtatcgactccctatactgcagcggtgttggagtacagggtggagttccacgaccaaagtgacgagttatctttggagaactctctcgccaacggtcatgctaacggtaatgcctcatatgacgctcagcacccttgtagagcaaatgttgccgttaaaagagaattgcatacaccattatccgatagatcatgtacccaccttgaatttgacatatcaggcacaggcttacaatatgaaaccggtgatcatgtaggcgtttattgtgagaatctaattgagactgtcgaagaagctgaaagactgttgggtttgagcccacagacttattttagtgttcacaccgacaaagaagatggaactccccttggtggtagcgcacttcctccacctttcccaccctgtactttaaggacggccttatctcgatatgcggatttgttgaatgcccctaaaaagagtgcactgacagctcttgctgcttacgcgagtgaccctacggaagctgacagattaaaacacctagcttcacctgccggaaaggaagaatatgcccaatatgttgtggcttcccaaaggaccctactagaagtaatggccgatttcccatcggcaaagccacctctaggtgtgtttttcgcgggtgtcgccccaagattgcagcctagattttattccatttcttcttccccaaagattgctcccttcaggattcatgtaacctgcgctttggtgtatgacaaaactccaactggaagaatccataaaggtatctgttctacgtggataaagaatgctgtacctttggaggagagctcggattgttcgtcagctcctatctttgttcggaatagcaattttaaattaccatctgacgcaaacataccaattatcatgatcggtccaggcactgggctagcaccattcaggggttttttacaagaacgcctggctttaaaagagtccggtgcagaactgggcccagccattttgttctttggatgtcgtaacaggaaaatggacttcatatatgaagatgaactgaacgattttgtaaaggctggtgttgtgagtgagttgattgttgcctttagcagagaaggatcaactaaagaatacgttcaacacaagatggcacaacgtgcatctgacgtatggaaaatgatcagcgatggaggttacatttacgtctgcggcgacgcaaagggtatggctagagatgtacataggactttgcacaccatcgcccaagaacaaggctcaatgtcctcatccgaagccgagggtatggtaaaaaatttacaaatgacaggaaggtatctccgtgacgtctgg

SEQ ID NO: 1433 - DNA, 3462 bp, Artificial Sequence
  G8H-CPR engineered fusion
atggactacctgaccattgcactcggttttctgttcgccctaaccctgtaccaggccttgatttctttctcccggaagtctaagaacctaccccctggtccggcaccacttccctttattggaaatcttcacctgctgggtgaccagccacacaagtctcttgcaaagctagcgaagaagcacggacccatcatgggcctccagttcggacaagtgacaaccattgtcgttacaagctccggcatggccaaggaggtccttcagaagcaggacctggctttttcgtcgcgatccgtgcccaacgcacttcacgctcacgatcaatacaaatacagcgtcatttggcttcccgtggccagccaatggaggtccctccggaaagtgctgaactctaacatcttctcgggaaatcggctggacgcaaaccagcatctaagatgccgcaaggttcaagagctcattgcttactgccgaaagaactgccagacaggcgaagccgtcgatcttggtcgggcggcctttcgaactagtctgaacctcctgtcgaataccatctttagcaaggatctcaccgatccttacagtgatagcgctaaggaatttaaagatctggtttggaatgtgatggtggaggctggcaagcccaatctcgtcgacttcttccccgttctggacaaggttgaccctcagggaattagaaagcgaatgactttccacttcggtaaaatcctccagctgttcggtggcctcatcaatgagaggttgcagcagaacaaggcgaagggcgctcacaaagacgtgctcgatgtgctgcttaagacctcgcaggagactcccgacgagctcaaccgaacccatatcgaacgaatgtgtctcgacctctttgtggctggaactgataccacttcctccaccctggagtgggctatggcggagatgctgaagagcccggacaaaatgaacaaggccaaggaggagctggcacaggtgatcgggaaaggcaaggccgttgaagaggccgatatcgcgagcctcccatacctccggtgcgccataaaggaaacgctgagaatccaccctcccgtgcctttcttaatccctcgacggactgagcaggaggtcgaggtttgtggatacactgtacctaaaaactcccaggtgtttgtcaacgtctgggctatcggccgagatgagaccacgtggcctgacgccctagagttcaagcccgagcgttttctggaaagtgaaattgacatgcggggtcgggacttcgagcttctgccctttggcgccggtcgacgaatctgccccggcttcccattggcggtgagaatggtgccggtcatgcttgggtcactgctaaattccttcgactggaagcttgagggtggaattgcccccaaggatctcgacatggaggagaaattcggtattacgctacaaaaggctcatccccttcgagctattcccacctccttgggtggcggctctggcggaagcacatctagcggtagttccggtggttggagacggtcctccggatctggtaaaaaggttgttgaaccacctaaactaatcgtgccaaaaagtgttgtcgaaccagaggaaatcgatgaaggtaagaaaaagtttactatattttttggcacccagacaggtacggctgagggcttcgcaaaggcactagccgaggaagctaaagctaggtatgaaaaggcagtcattaaggttatcgatatagacgattatgcggctgatgacgaggaatatgaagaaaaatttaggaaggaaacgttagcttttttcattctggctacttacggcgatggtgaaccaacagacaatgcagccagattctacaagtggtttgttgaagggaatgacaggggtgattggttaaaaaatttgcaatacggtgtttttggcctcgggaatcgccagtacgaacatttcaataagatagccaaagtggtagatgagaaggttgcggaacaaggtggcaaacgtatcgtccccttagttttaggcgatgacgatcagtgtattgaagacgatttcgcggcatggcgtgaaaatgtttggcccgaacttgataatcttcttagagacgaagacgatactactgtttcaacaacctacacggccgcaatccccgaatacagagttgttttcccagataagtcagatagcttaatttcagaagcaaatggtcacgctaatggttatgctaatgggaatacggtctacgatgctcaacacccatgcagatctaatgttgcagtccgcaaggagttacacactccagcatcagatcgctcatgtactcatcttgatttcgatatcgctggcaccggattgagctacgggactggagatcatgtaggtgtctattgtgataatttatctgaaaccgtcgaggaagctgagaggttgcttaatctgccgcctgaaacgtattttagcctccacgctgataaggaagacggcacacctttggcaggatcttctttgcctcctccctttccaccttgtacattacggactgctttgactaggtatgcggatttgctgaacacccccaaaaagagcgctttgctggccttagctgcatatgcttccgatcctaatgaagccgatagactaaaatacctagccagtcccgctggcaaggacgagtacgcacaatctcttgtcgctaaccaaagatcgcttttagaggtaatggccgagtttccctctgcaaaaccaccacttggggtttttttcgcggctattgctcctcgtcttcaaccaaggttctattcaatttcctctagtccgcgtatggctcctagtagaatccatgttacatgtgcattagtctacgaaaagactccaggtggtagaattcataagggagtttgttctacttggatgaaaaatgctattccgctggaagaatcacgtgactgctcgtgggcccccatctttgtacgtcaaagtaattttaagcttcctgcagaccctaaggtgccagtgataatgataggtccaggtaccggcttggctcctttcagaggattcttacaggaaaggttagctttgaaggaagaaggcgcagaattgggtactgctgtgttcttctttggttgtcgtaacagaaaaatggactacatttacgaagatgagctaaaccatttcttagaaattggtgccttgtccgaactattagtcgccttcagcagggagggccctacgaagcaatacgttcagcataaaatggctgaaaaagcgtcagacatttggcgaatgataagtgatggtgcctatgtgtatgtgtgcggggatgcaaagggtatggctcgtgatgtccacagaacactacatactatcgcccaagagcaaggctcgatggattctacacaagctgaaggttttgtaaagaatctacaaatgacgggtaggtacctaagagatgtttgg

SEQ ID NO: 1434 - DNA, 3450 bp, Artificial Sequence
  G8H-CPR engineered fusion
atggattaccttacaattactttgggactcctcttcgccctcaccttctatcagggactgtcctacctgtcacgacgatctaaaaagctcccccctggaccggctccccttcccatcatcgggaacctccacatgctgggggatcagccccataagtctctggccaagctctcaaagaagcatggtccgatcatgtctcttaagctgggacaaatcaccacagttgtggtgtcttcttctggaatggctaaggaagtcctgcagaaacacgacttggcctttagtagtcgatctattcctaacgccctgcacgctcataaccagtatcagttcagcgtcgtttggctccccgtcgcttcccgttggcgatcgctgcgaaagaccctcaactcgaacattttctcgggtaacaggttggatgccaatcagcacttgagatcccgaaaggtcgaagagttaatcgcttactgccgaaagaactgtcagacaggcgaggccgtcgacgtcggccgggcagccttccggacatcgttgaacttgctctccaacctcatcttctccaaggatctgaccgatccttattcggattcagctaaggaattcaaggacctcgtctggaatatcatggtcgaggctggaaagccaaacttggtcgattattttcccgtactcgagaaagtcgaccctcagggcatcagacgacgaatgactgtccatttcggaaaagttctcaagctgttcgacggtcttgtgaatgagcgactagagcagcgtcgtagccgaggaggaaagaatgatgtgttggacgtgctgcttactaactcagaggagaaccccgaggagattgatcgaacgcacattgagcggatgtgcttggacctattcgttgcaggtactgatacgacttcatctactcttgagtgggccatggccgagatgctgaagaaccctgataagatgaagaagacgcaggccgagctagctgaggtgatcggcagaggtaaggcgattgaggagagcgacctccctcgactgccttaccttcgatgtgttgtgaaagaaaccctgcgaattcaccctccggtccccttcctgattcccaggcgagtcgagcaagacgttgaggtgtgtggctataaggtccctaagggatctcaagtcctggtcaacgcgtggacaatcgggcgagacgaggccgtctgggaggacgctctagcttttaagcccgaacggttcctcgagtccgagctggacattagaggacgagatttcgagttgattccattcggagctggtcgtagaatttgccctggtctacccctcgccttgcggacagtccctctcatggtcggctctctgctcaactcgttcaattggaagctggagggcggaatcacccctaaggacctggacatggaagaaaagttcggcataaccctgcagaaggcacatcctctgagagccgtgcctatccctttcggtggcggctctggcggaagcacatctagcggtagttccggtggttggaagaaaaccacagctgatcgctcaggcgagttaaaaccattaatgattcccaaatcactgatggcaaaggatgaagacgatgatttggacctagggtcaggtaagacaagggtgtccatcttctttggaactcaaacgggtactgctgaggggttcgcaaaggctctatcggaagaaataaaagctaggtacgaaaaagcagccgtcaaagacgattacgccgctgatgatgaccaatacgaagaaaaattgaaaaaagaaacattagccttcttctgcgtcgcaacttatggtgacggcgaaccaacagataatgcggctagattctacaaatggttcacggaagagaatgagagagatattaaattgcaacaactggcttacggtgtttttgcacttggaaacaggcagtacgaacattttaacaagattggaattgttttggatgaggagttgtgtaaaaagggagctaagagattgatagaagtgggcttgggagatgatgatcagtcaattgaggatgatttcaacgcatggaaggaaagcttgtggtctgagttggataagctccttaaggatgaagatgataaatcggtcgcgaccccttatactgctgtcataccggaatacagggtggtaactcatgaccctaggtttactacacagaagagtatggaatccaatgtggcgaatggtaacaccacaattgatatccatcatccatgtagagttgatgtggctgtccagaaagaattgcatacccatgaatcggacaggtcatgtattcatttggaattcgacatttcacgtacaggtattacttatgaaactggcgatcacgtgggcgtctacgctgagaatcacgtcgaaattgttgaggaagcaggaaaattgctgggacattcactagaccttgttttttcgatacatgcagataaggaagatggaagtccgttggaatctgcagtccctcctcctttcccaggaccatgtaccttgggtactggtttggccagatatgcagatctccttaatcctccccggaaaagcgcattggtggctttggctgcctatgcaactgaaccttcagaagctgaaaaacttaaacatctaacatccccagatggaaaggacgaatatagtcagtggatcgtggcgagtcaacgctcacttttagaagttatggcggcatttccaagcgctaaaccaccactgggtgttttctttgccgcaatagctcctagattacaacccagatattactctatctcatcctctccacgattagctccttctagagttcacgtcacttctgctttggtctacggtccaacgccaacaggtcgaattcataaaggtgtatgcagtacatggatgaagaatgctgttcctgctgagaaatcgcacgaatgttccggtgcccctatttttatcagagccagcaacttcaaattgccatctaatccgtctactcccattgttatggtaggtccgggtactggccttgccccgttcagaggttttttgcaagagcgaatggccttgaaggaagacggggaagagttaggttcttccctattatttttcggctgccggaatcgacaaatggactttatttatgaagatgaattgaacaactttgtggatcaaggagttatttccgaattgattatggcgttctctagagaaggtgcacaaaaagaatacgtccaacataaaatgatggaaaaggcagctcaagtatgggatctaattaaagaagaaggatatttatacgtatgtggggatgcaaaaggtatggccagagatgttcataggactttgcacactatcgtccaagaacaagaaggtgtctcatctagtgaagctgaagcgattgttaaaaaattacaaacagaaggcagatatttgagggatgtttgg

SEQ ID NO: 1435 - DNA, 3462 bp, Artificial Sequence
  G8H-CPR engineered fusion
atggattaccttacaattactttgggactcctcttcgccctcaccttctatcagggactgtcctacctgtcacgacgatctaaaaagctcccccctggaccggctccccttcccatcatcgggaacctccacatgctgggggatcagccccataagtctctggccaagctctcaaagaagcatggtccgatcatgtctcttaagctgggacaaatcaccacagttgtggtgtcttcttctggaatggctaaggaagtcctgcagaaacacgacttggcctttagtagtcgatctattcctaacgccctgcacgctcataaccagtatcagttcagcgtcgtttggctccccgtcgcttcccgttggcgatcgctgcgaaagaccctcaactcgaacattttctcgggtaacaggttggatgccaatcagcacttgagatcccgaaaggtcgaagagttaatcgcttactgccgaaagaactgtcagacaggcgaggccgtcgacgtcggccgggcagccttccggacatcgttgaacttgctctccaacctcatcttctccaaggatctgaccgatccttattcggattcagctaaggaattcaaggacctcgtctggaatatcatggtcgaggctggaaagccaaacttggtcgattattttcccgtactcgagaaagtcgaccctcagggcatcagacgacgaatgactgtccatttcggaaaagttctcaagctgttcgacggtcttgtgaatgagcgactagagcagcgtcgtagccgaggaggaaagaatgatgtgttggacgtgctgcttactaactcagaggagaaccccgaggagattgatcgaacgcacattgagcggatgtgcttggacctattcgttgcaggtactgatacgacttcatctactcttgagtgggccatggccgagatgctgaagaaccctgataagatgaagaagacgcaggccgagctagctgaggtgatcggcagaggtaaggcgattgaggagagcgacctccctcgactgccttaccttcgatgtgttgtgaaagaaaccctgcgaattcaccctccggtccccttcctgattcccaggcgagtcgagcaagacgttgaggtgtgtggctataaggtccctaagggatctcaagtcctggtcaacgcgtggacaatcgggcgagacgaggccgtctgggaggacgctctagcttttaagcccgaacggttcctcgagtccgagctggacattagaggacgagatttcgagttgattccattcggagctggtcgtagaatttgccctggtctacccctcgccttgcggacagtccctctcatggtcggctctctgctcaactcgttcaattggaagctggagggcggaatcacccctaaggacctggacatggaagaaaagttcggcataaccctgcagaaggcacatcctctgagagccgtgcctatccctttcggtggcggctctggcggaagcacatctagcggtagttccggtggttggagacgctcgtcagatagatctaaagaaagcaacccagttgttgtacctagacctttactggtagaagctgaagaagatgaggtggaagtcggttctggaaaaacaaaattgacaattttctacggtacacagaccggtactgcggaaggtttcgctaaggctctagcagaagagatcaaggctcgttacgaaaaagccgttgtaaaagtcgtcgacctagatgactatgccgacgatgacgaacaatatgaggaaaagttgaaaaaggaaacgctggctttctttatggttgctacttatggggacggtgaaccgacagacaatgccgctagattctataagtggtttaccgacggcaaagaaagaggtttgtggttacagcaattgaaatttggtgtgtttggtctaggtaatagacagtatgagcattttaataagatagggaaggttttagaccaggatttaagtgaacaagggggtaaacgattgattccagtaggactaggagatgatgaccagtgcattgaagacgattttgccgcctggcgggaacttttgtggcctgaattagatcagttgcttagggatggtgacgacactaacaccgtgagtaccccctatactgccgtcatccctgagtacagagtcgtcatatacgatccgacaactacctcattcgaagacaagcatctatcaatggcaaatgggaatgcctcttacgacatccaccacccatgtcgcgttaatgtagctgttcaaagagaactgcataagccagagtctgatcgatcatgtatccatttggaattcgatatatcctctacagggatcacatatgagaccggtgatcatgtaggcgtgtacgccgacaactgtgatgaaactgtagaagaagctgcccgattgttgggccagcctttggatctacttttttccattcattccgacgacgataacggtactcccctaggtggtagtctgccgccaccttttccaggcccttgtaccttaaggacagctttggctagatatgccgacttattgaatccaccacgaaaagctgcccttattgcccttgcagcccatgccattgaaccatcagaatcggaaaaattaaaattcttgagttcgccacaaggaaaagacgattactctcaatgggtcgttgggtctcaacgtagtctattggaagttatggctgaatttcccagcgcaaagccaccattgggtgttttcttcgccgcagttgctactagattacagccaagatattattcaattagcagttctcctagatttgcaccttctagagttcatgttacttgctctttagtttacggtcccacatcaaccggacgtattcacaaaggagtttgttcaacctggatgaagaatgctgtaccattagaaaagtcacgcaactgttcatgggccccaatttttattcgtgcttcaaacttcaaattacctagcaacccaagtattcctatagtgatggttggtccaggcactggcttagcacctttcagaggcttcttacaagagagattggccctgaaggaagacggtattcaattgggtccagccttgcttttttttggttgcagaaatagaaggatggattttatatatgaggacgagttaaataacttcgtggaccgcggtgttcttagtgacttaattgtcgcctttagtagagagggtccgcagaaagaatatgttcaacacaagatgatggaaaaagcggcttacatttggaatctaatttctcaggaaggctatctatatgtatgcggcgatgccaagggaatggctcgagatgttcatagaactcttcataccattgtccaagaacaagaaaatgctgatacttcaaaggccgaatcggttgtgaaaaaacttcaaatggacgggcgctatttgagagatgtgtgg

SEQ ID NO: 1436 - DNA, 3462 bp, Artificial Sequence
  G8H-CPR engineered fusion
atggattaccttacaattactttgggactcctcttcgccctcaccttctatcagggactgtcctacctgtcacgacgatctaaaaagctcccccctggaccggctccccttcccatcatcgggaacctccacatgctgggggatcagccccataagtctctggccaagctctcaaagaagcatggtccgatcatgtctcttaagctgggacaaatcaccacagttgtggtgtcttcttctggaatggctaaggaagtcctgcagaaacacgacttggcctttagtagtcgatctattcctaacgccctgcacgctcataaccagtatcagttcagcgtcgtttggctccccgtcgcttcccgttggcgatcgctgcgaaagaccctcaactcgaacattttctcgggtaacaggttggatgccaatcagcacttgagatcccgaaaggtcgaagagttaatcgcttactgccgaaagaactgtcagacaggcgaggccgtcgacgtcggccgggcagccttccggacatcgttgaacttgctctccaacctcatcttctccaaggatctgaccgatccttattcggattcagctaaggaattcaaggacctcgtctggaatatcatggtcgaggctggaaagccaaacttggtcgattattttcccgtactcgagaaagtcgaccctcagggcatcagacgacgaatgactgtccatttcggaaaagttctcaagctgttcgacggtcttgtgaatgagcgactagagcagcgtcgtagccgaggaggaaagaatgatgtgttggacgtgctgcttactaactcagaggagaaccccgaggagattgatcgaacgcacattgagcggatgtgcttggacctattcgttgcaggtactgatacgacttcatctactcttgagtgggccatggccgagatgctgaagaaccctgataagatgaagaagacgcaggccgagctagctgaggtgatcggcagaggtaaggcgattgaggagagcgacctccctcgactgccttaccttcgatgtgttgtgaaagaaaccctgcgaattcaccctccggtccccttcctgattcccaggcgagtcgagcaagacgttgaggtgtgtggctataaggtccctaagggatctcaagtcctggtcaacgcgtggacaatcgggcgagacgaggccgtctgggaggacgctctagcttttaagcccgaacggttcctcgagtccgagctggacattagaggacgagatttcgagttgattccattcggagctggtcgtagaatttgccctggtctacccctcgccttgcggacagtccctctcatggtcggctctctgctcaactcgttcaattggaagctggagggcggaatcacccctaaggacctggacatggaagaaaagttcggcataaccctgcagaaggcacatcctctgagagccgtgcctatccctttcggtggcggctctggcggaagcacatctagcggtagttccggtggttggcgaaagggtgccggttctgcaaagaaagttgtcgaacctccaaaactagttttaccaaaagctctctcagaaaccgaggaggtggacgacggaaaaaagaaggtcactattttttttggtacccaaactggtactgcagaaggttttgcgaaagctcttgcagaagaagccaaagcgagatatccacaagctaatttcaaagtcgtggatatggatgactatgcagcggaggacgaagagtacgaagagaaattgaccaaagagactatggctttttttttccttgcaacctacggtgatggtgagccaactgacaatgctgcacgcttttacaagtggttcgccgaaggtaaggaacgaggtgattcatttaaaaatttacattatggtgtgtttggtttgggaaatagacaatatgagcatttcaacaaaattgctatcgtagttgacaacattttggccgagcaaggcgggaaaagattggttcctgtaggtttaggggatgatgaccagtgtatcgaagacgatttcgcagcatggagagaaaatgtttggccggagcttgacaatttgttacgaaatgaggacgatgcaagtacagtatcgactccctatactgcagcggtgttggagtacagggtggagttccacgaccaaagtgacgagttatctttggagaactctctcgccaacggtcatgctaacggtaatgcctcatatgacgctcagcacccttgtagagcaaatgttgccgttaaaagagaattgcatacaccattatccgatagatcatgtacccaccttgaatttgacatatcaggcacaggcttacaatatgaaaccggtgatcatgtaggcgtttattgtgagaatctaattgagactgtcgaagaagctgaaagactgttgggtttgagcccacagacttattttagtgttcacaccgacaaagaagatggaactccccttggtggtagcgcacttcctccacctttcccaccctgtactttaaggacggccttatctcgatatgcggatttgttgaatgcccctaaaaagagtgcactgacagctcttgctgcttacgcgagtgaccctacggaagctgacagattaaaacacctagcttcacctgccggaaaggaagaatatgcccaatatgttgtggcttcccaaaggaccctactagaagtaatggccgatttcccatcggcaaagccacctctaggtgtgtttttcgcgggtgtcgccccaagattgcagcctagattttattccatttcttcttccccaaagattgctcccttcaggattcatgtaacctgcgctttggtgtatgacaaaactccaactggaagaatccataaaggtatctgttctacgtggataaagaatgctgtacctttggaggagagctcggattgttcgtcagctcctatctttgttcggaatagcaattttaaattaccatctgacgcaaacataccaattatcatgatcggtccaggcactgggctagcaccattcaggggttttttacaagaacgcctggctttaaaagagtccggtgcagaactgggcccagccattttgttctttggatgtcgtaacaggaaaatggacttcatatatgaagatgaactgaacgattttgtaaaggctggtgttgtgagtgagttgattgttgcctttagcagagaaggatcaactaaagaatacgttcaacacaagatggcacaacgtgcatctgacgtatggaaaatgatcagcgatggaggttacatttacgtctgcggcgacgcaaagggtatggctagagatgtacataggactttgcacaccatcgcccaagaacaaggctcaatgtcctcatccgaagccgagggtatggtaaaaaatttacaaatgacaggaaggtatctccgtgacgtctgg

SEQ ID NO: 1437 - DNA, 3462 bp, Artificial Sequence
  G8H-CPR engineered fusion
atggattaccttacaattactttgggactcctcttcgccctcaccttctatcagggactgtcctacctgtcacgacgatctaaaaagctcccccctggaccggctccccttcccatcatcgggaacctccacatgctgggggatcagccccataagtctctggccaagctctcaaagaagcatggtccgatcatgtctcttaagctgggacaaatcaccacagttgtggtgtcttcttctggaatggctaaggaagtcctgcagaaacacgacttggcctttagtagtcgatctattcctaacgccctgcacgctcataaccagtatcagttcagcgtcgtttggctccccgtcgcttcccgttggcgatcgctgcgaaagaccctcaactcgaacattttctcgggtaacaggttggatgccaatcagcacttgagatcccgaaaggtcgaagagttaatcgcttactgccgaaagaactgtcagacaggcgaggccgtcgacgtcggccgggcagccttccggacatcgttgaacttgctctccaacctcatcttctccaaggatctgaccgatccttattcggattcagctaaggaattcaaggacctcgtctggaatatcatggtcgaggctggaaagccaaacttggtcgattattttcccgtactcgagaaagtcgaccctcagggcatcagacgacgaatgactgtccatttcggaaaagttctcaagctgttcgacggtcttgtgaatgagcgactagagcagcgtcgtagccgaggaggaaagaatgatgtgttggacgtgctgcttactaactcagaggagaaccccgaggagattgatcgaacgcacattgagcggatgtgcttggacctattcgttgcaggtactgatacgacttcatctactcttgagtgggccatggccgagatgctgaagaaccctgataagatgaagaagacgcaggccgagctagctgaggtgatcggcagaggtaaggcgattgaggagagcgacctccctcgactgccttaccttcgatgtgttgtgaaagaaaccctgcgaattcaccctccggtccccttcctgattcccaggcgagtcgagcaagacgttgaggtgtgtggctataaggtccctaagggatctcaagtcctggtcaacgcgtggacaatcgggcgagacgaggccgtctgggaggacgctctagcttttaagcccgaacggttcctcgagtccgagctggacattagaggacgagatttcgagttgattccattcggagctggtcgtagaatttgccctggtctacccctcgccttgcggacagtccctctcatggtcggctctctgctcaactcgttcaattggaagctggagggcggaatcacccctaaggacctggacatggaagaaaagttcggcataaccctgcagaaggcacatcctctgagagccgtgcctatccctttcggtggcggctctggcggaagcacatctagcggtagttccggtggttggagacggtcctccggatctggtaaaaaggttgttgaaccacctaaactaatcgtgccaaaaagtgttgtcgaaccagaggaaatcgatgaaggtaagaaaaagtttactatattttttggcacccagacaggtacggctgagggcttcgcaaaggcactagccgaggaagctaaagctaggtatgaaaaggcagtcattaaggttatcgatatagacgattatgcggctgatgacgaggaatatgaagaaaaatttaggaaggaaacgttagcttttttcattctggctacttacggcgatggtgaaccaacagacaatgcagccagattctacaagtggtttgttgaagggaatgacaggggtgattggttaaaaaatttgcaatacggtgtttttggcctcgggaatcgccagtacgaacatttcaataagatagccaaagtggtagatgagaaggttgcggaacaaggtggcaaacgtatcgtccccttagttttaggcgatgacgatcagtgtattgaagacgatttcgcggcatggcgtgaaaatgtttggcccgaacttgataatcttcttagagacgaagacgatactactgtttcaacaacctacacggccgcaatccccgaatacagagttgttttcccagataagtcagatagcttaatttcagaagcaaatggtcacgctaatggttatgctaatgggaatacggtctacgatgctcaacacccatgcagatctaatgttgcagtccgcaaggagttacacactccagcatcagatcgctcatgtactcatcttgatttcgatatcgctggcaccggattgagctacgggactggagatcatgtaggtgtctattgtgataatttatctgaaaccgtcgaggaagctgagaggttgcttaatctgccgcctgaaacgtattttagcctccacgctgataaggaagacggcacacctttggcaggatcttctttgcctcctccctttccaccttgtacattacggactgctttgactaggtatgcggatttgctgaacacccccaaaaagagcgctttgctggccttagctgcatatgcttccgatcctaatgaagccgatagactaaaatacctagccagtcccgctggcaaggacgagtacgcacaatctcttgtcgctaaccaaagatcgcttttagaggtaatggccgagtttccctctgcaaaaccaccacttggggtttttttcgcggctattgctcctcgtcttcaaccaaggttctattcaatttcctctagtccgcgtatggctcctagtagaatccatgttacatgtgcattagtctacgaaaagactccaggtggtagaattcataagggagtttgttctacttggatgaaaaatgctattccgctggaagaatcacgtgactgctcgtgggcccccatctttgtacgtcaaagtaattttaagcttcctgcagaccctaaggtgccagtgataatgataggtccaggtaccggcttggctcctttcagaggattcttacaggaaaggttagctttgaaggaagaaggcgcagaattgggtactgctgtgttcttctttggttgtcgtaacagaaaaatggactacatttacgaagatgagctaaaccatttcttagaaattggtgccttgtccgaactattagtcgccttcagcagggagggccctacgaagcaatacgttcagcataaaatggctgaaaaagcgtcagacatttggcgaatgataagtgatggtgcctatgtgtatgtgtgcggggatgcaaagggtatggctcgtgatgtccacagaacactacatactatcgcccaagagcaaggctcgatggattctacacaagctgaaggttttgtaaagaatctacaaatgacgggtaggtacctaagagatgtttgg

SEQ ID NO: 1438 - DNA, 3450 bp, Artificial Sequence
  G8H-CPR engineered fusion
atggactacctcaccctggtcctcggcctgcttttcgccctcacattctaccagggcctcagctacctgtcccgaaagagtaagaaactcccccctggtcccgcaccgcttccttttatcggaaacctccacctgttgggtgaccagccccataagtctctggctaagctctctaagaagcatggccctctaatgagtctcaagttgggacacatcaccacggtcgtcatttcctcttctggaatggcgaaagaagttctccagaaacaggatctagcattttcttcacgttcggtccctgacgctttgcatgctcataaccaattccagttttcagtggtttggctgcctgttgcctcccgatggaggtccctgcgcaagattctgaactctaacatcttttcaggaaaccgcctggatgcaaaccagcacctgcgatgccgcaaggtccaggaattaatcgcctattgccgaaaaaactgccagactggcgaggccgttgatgtgggacgagccgcctttcgaacctcgcttaacctcctctccaacaccattttctcaaaggatctgaccgatccgtactcagactctgccaaggagtttaaggacttggtctggaacattatggtcgaggcaggtaagcccaatctggtggactttttccctgtcctcgagaaggtggacccccagggaatccgaaagagaatgaccgtacacttcggtaaggtccttaagctgtttaatggattgattaacgagagactggaacagaagagactccagtcaggtaacaacgatgtgttggacgtactgctgacaacttctgaagaatctcctgaggagatcgatcggacccatatcgagagaatgtgccttgatctgtttgtggctgggactgacaccacatcatccacgctagagtgggcaatggcagaaatgttaaagaaccctgacaaaatgcagaagactcaggccgagatcgccgaggtaattggaaaggggaaggctatcgaggaggccgatgttgcccgattgccctaccttcgatgtgttgtgaaagagaccctgagaatccaccctcccgtgcctttcctgattcctcgaaaggtcgaccaagacgtcgaggtgtgtggatacaaggtccctaaaggctcccaggttctcgtcaacgcctgggccatcggacgagatggaactgtttgggaggatccactcgcgttcaagccggagcgttttttcgaatcagaaatcgacattagaggcagggactttgaggtcatcccatttggagcaggccggcgcatttgtcctggcctgcctttagcagctcgaatggtgcccgtcatgctgggctctctgctgaactcgtttaactggaagctggagggaggcatcgcccccaaggatcttgacatggatgagaagttcggcattaccttgcagaaggctcatccactcagagctgtcccttcccctctaggtggcggctctggcggaagcacatctagcggtagttccggtggttggaagaaaaccacagctgatcgctcaggcgagttaaaaccattaatgattcccaaatcactgatggcaaaggatgaagacgatgatttggacctagggtcaggtaagacaagggtgtccatcttctttggaactcaaacgggtactgctgaggggttcgcaaaggctctatcggaagaaataaaagctaggtacgaaaaagcagccgtcaaagacgattacgccgctgatgatgaccaatacgaagaaaaattgaaaaaagaaacattagccttcttctgcgtcgcaacttatggtgacggcgaaccaacagataatgcggctagattctacaaatggttcacggaagagaatgagagagatattaaattgcaacaactggcttacggtgtttttgcacttggaaacaggcagtacgaacattttaacaagattggaattgttttggatgaggagttgtgtaaaaagggagctaagagattgatagaagtgggcttgggagatgatgatcagtcaattgaggatgatttcaacgcatggaaggaaagcttgtggtctgagttggataagctccttaaggatgaagatgataaatcggtcgcgaccccttatactgctgtcataccggaatacagggtggtaactcatgaccctaggtttactacacagaagagtatggaatccaatgtggcgaatggtaacaccacaattgatatccatcatccatgtagagttgatgtggctgtccagaaagaattgcatacccatgaatcggacaggtcatgtattcatttggaattcgacatttcacgtacaggtattacttatgaaactggcgatcacgtgggcgtctacgctgagaatcacgtcgaaattgttgaggaagcaggaaaattgctgggacattcactagaccttgttttttcgatacatgcagataaggaagatggaagtccgttggaatctgcagtccctcctcctttcccaggaccatgtaccttgggtactggtttggccagatatgcagatctccttaatcctccccggaaaagcgcattggtggctttggctgcctatgcaactgaaccttcagaagctgaaaaacttaaacatctaacatccccagatggaaaggacgaatatagtcagtggatcgtggcgagtcaacgctcacttttagaagttatggcggcatttccaagcgctaaaccaccactgggtgttttctttgccgcaatagctcctagattacaacccagatattactctatctcatcctctccacgattagctccttctagagttcacgtcacttctgctttggtctacggtccaacgccaacaggtcgaattcataaaggtgtatgcagtacatggatgaagaatgctgttcctgctgagaaatcgcacgaatgttccggtgcccctatttttatcagagccagcaacttcaaattgccatctaatccgtctactcccattgttatggtaggtccgggtactggccttgccccgttcagaggttttttgcaagagcgaatggccttgaaggaagacggggaagagttaggttcttccctattatttttcggctgccggaatcgacaaatggactttatttatgaagatgaattgaacaactttgtggatcaaggagttatttccgaattgattatggcgttctctagagaaggtgcacaaaaagaatacgtccaacataaaatgatggaaaaggcagctcaagtatgggatctaattaaagaagaaggatatttatacgtatgtggggatgcaaaaggtatggccagagatgttcataggactttgcacactatcgtccaagaacaagaaggtgtctcatctagtgaagctgaagcgattgttaaaaaattacaaacagaaggcagatatttgagggatgtttgg

SEQ ID NO: 1439 - DNA, 3462 bp, Artificial Sequence
  G8H-CPR engineered fusion
atggactacctcaccctggtcctcggcctgcttttcgccctcacattctaccagggcctcagctacctgtcccgaaagagtaagaaactcccccctggtcccgcaccgcttccttttatcggaaacctccacctgttgggtgaccagccccataagtctctggctaagctctctaagaagcatggccctctaatgagtctcaagttgggacacatcaccacggtcgtcatttcctcttctggaatggcgaaagaagttctccagaaacaggatctagcattttcttcacgttcggtccctgacgctttgcatgctcataaccaattccagttttcagtggtttggctgcctgttgcctcccgatggaggtccctgcgcaagattctgaactctaacatcttttcaggaaaccgcctggatgcaaaccagcacctgcgatgccgcaaggtccaggaattaatcgcctattgccgaaaaaactgccagactggcgaggccgttgatgtgggacgagccgcctttcgaacctcgcttaacctcctctccaacaccattttctcaaaggatctgaccgatccgtactcagactctgccaaggagtttaaggacttggtctggaacattatggtcgaggcaggtaagcccaatctggtggactttttccctgtcctcgagaaggtggacccccagggaatccgaaagagaatgaccgtacacttcggtaaggtccttaagctgtttaatggattgattaacgagagactggaacagaagagactccagtcaggtaacaacgatgtgttggacgtactgctgacaacttctgaagaatctcctgaggagatcgatcggacccatatcgagagaatgtgccttgatctgtttgtggctgggactgacaccacatcatccacgctagagtgggcaatggcagaaatgttaaagaaccctgacaaaatgcagaagactcaggccgagatcgccgaggtaattggaaaggggaaggctatcgaggaggccgatgttgcccgattgccctaccttcgatgtgttgtgaaagagaccctgagaatccaccctcccgtgcctttcctgattcctcgaaaggtcgaccaagacgtcgaggtgtgtggatacaaggtccctaaaggctcccaggttctcgtcaacgcctgggccatcggacgagatggaactgtttgggaggatccactcgcgttcaagccggagcgttttttcgaatcagaaatcgacattagaggcagggactttgaggtcatcccatttggagcaggccggcgcatttgtcctggcctgcctttagcagctcgaatggtgcccgtcatgctgggctctctgctgaactcgtttaactggaagctggagggaggcatcgcccccaaggatcttgacatggatgagaagttcggcattaccttgcagaaggctcatccactcagagctgtcccttcccctctaggtggcggctctggcggaagcacatctagcggtagttccggtggttggagacgctcgtcagatagatctaaagaaagcaacccagttgttgtacctagacctttactggtagaagctgaagaagatgaggtggaagtcggttctggaaaaacaaaattgacaattttctacggtacacagaccggtactgcggaaggtttcgctaaggctctagcagaagagatcaaggctcgttacgaaaaagccgttgtaaaagtcgtcgacctagatgactatgccgacgatgacgaacaatatgaggaaaagttgaaaaaggaaacgctggctttctttatggttgctacttatggggacggtgaaccgacagacaatgccgctagattctataagtggtttaccgacggcaaagaaagaggtttgtggttacagcaattgaaatttggtgtgtttggtctaggtaatagacagtatgagcattttaataagatagggaaggttttagaccaggatttaagtgaacaagggggtaaacgattgattccagtaggactaggagatgatgaccagtgcattgaagacgattttgccgcctggcgggaacttttgtggcctgaattagatcagttgcttagggatggtgacgacactaacaccgtgagtaccccctatactgccgtcatccctgagtacagagtcgtcatatacgatccgacaactacctcattcgaagacaagcatctatcaatggcaaatgggaatgcctcttacgacatccaccacccatgtcgcgttaatgtagctgttcaaagagaactgcataagccagagtctgatcgatcatgtatccatttggaattcgatatatcctctacagggatcacatatgagaccggtgatcatgtaggcgtgtacgccgacaactgtgatgaaactgtagaagaagctgcccgattgttgggccagcctttggatctacttttttccattcattccgacgacgataacggtactcccctaggtggtagtctgccgccaccttttccaggcccttgtaccttaaggacagctttggctagatatgccgacttattgaatccaccacgaaaagctgcccttattgcccttgcagcccatgccattgaaccatcagaatcggaaaaattaaaattcttgagttcgccacaaggaaaagacgattactctcaatgggtcgttgggtctcaacgtagtctattggaagttatggctgaatttcccagcgcaaagccaccattgggtgttttcttcgccgcagttgctactagattacagccaagatattattcaattagcagttctcctagatttgcaccttctagagttcatgttacttgctctttagtttacggtcccacatcaaccggacgtattcacaaaggagtttgttcaacctggatgaagaatgctgtaccattagaaaagtcacgcaactgttcatgggccccaatttttattcgtgcttcaaacttcaaattacctagcaacccaagtattcctatagtgatggttggtccaggcactggcttagcacctttcagaggcttcttacaagagagattggccctgaaggaagacggtattcaattgggtccagccttgcttttttttggttgcagaaatagaaggatggattttatatatgaggacgagttaaataacttcgtggaccgcggtgttcttagtgacttaattgtcgcctttagtagagagggtccgcagaaagaatatgttcaacacaagatgatggaaaaagcggcttacatttggaatctaatttctcaggaaggctatctatatgtatgcggcgatgccaagggaatggctcgagatgttcatagaactcttcataccattgtccaagaacaagaaaatgctgatacttcaaaggccgaatcggttgtgaaaaaacttcaaatggacgggcgctatttgagagatgtgtgg

SEQ ID NO: 1440 - DNA, 3462 bp, Artificial Sequence
  G8H-CPR engineered fusion
atggactacctcaccctggtcctcggcctgcttttcgccctcacattctaccagggcctcagctacctgtcccgaaagagtaagaaactcccccctggtcccgcaccgcttccttttatcggaaacctccacctgttgggtgaccagccccataagtctctggctaagctctctaagaagcatggccctctaatgagtctcaagttgggacacatcaccacggtcgtcatttcctcttctggaatggcgaaagaagttctccagaaacaggatctagcattttcttcacgttcggtccctgacgctttgcatgctcataaccaattccagttttcagtggtttggctgcctgttgcctcccgatggaggtccctgcgcaagattctgaactctaacatcttttcaggaaaccgcctggatgcaaaccagcacctgcgatgccgcaaggtccaggaattaatcgcctattgccgaaaaaactgccagactggcgaggccgttgatgtgggacgagccgcctttcgaacctcgcttaacctcctctccaacaccattttctcaaaggatctgaccgatccgtactcagactctgccaaggagtttaaggacttggtctggaacattatggtcgaggcaggtaagcccaatctggtggactttttccctgtcctcgagaaggtggacccccagggaatccgaaagagaatgaccgtacacttcggtaaggtccttaagctgtttaatggattgattaacgagagactggaacagaagagactccagtcaggtaacaacgatgtgttggacgtactgctgacaacttctgaagaatctcctgaggagatcgatcggacccatatcgagagaatgtgccttgatctgtttgtggctgggactgacaccacatcatccacgctagagtgggcaatggcagaaatgttaaagaaccctgacaaaatgcagaagactcaggccgagatcgccgaggtaattggaaaggggaaggctatcgaggaggccgatgttgcccgattgccctaccttcgatgtgttgtgaaagagaccctgagaatccaccctcccgtgcctttcctgattcctcgaaaggtcgaccaagacgtcgaggtgtgtggatacaaggtccctaaaggctcccaggttctcgtcaacgcctgggccatcggacgagatggaactgtttgggaggatccactcgcgttcaagccggagcgttttttcgaatcagaaatcgacattagaggcagggactttgaggtcatcccatttggagcaggccggcgcatttgtcctggcctgcctttagcagctcgaatggtgcccgtcatgctgggctctctgctgaactcgtttaactggaagctggagggaggcatcgcccccaaggatcttgacatggatgagaagttcggcattaccttgcagaaggctcatccactcagagctgtcccttcccctctaggtggcggctctggcggaagcacatctagcggtagttccggtggttggcgaaagggtgccggttctgcaaagaaagttgtcgaacctccaaaactagttttaccaaaagctctctcagaaaccgaggaggtggacgacggaaaaaagaaggtcactattttttttggtacccaaactggtactgcagaaggttttgcgaaagctcttgcagaagaagccaaagcgagatatccacaagctaatttcaaagtcgtggatatggatgactatgcagcggaggacgaagagtacgaagagaaattgaccaaagagactatggctttttttttccttgcaacctacggtgatggtgagccaactgacaatgctgcacgcttttacaagtggttcgccgaaggtaaggaacgaggtgattcatttaaaaatttacattatggtgtgtttggtttgggaaatagacaatatgagcatttcaacaaaattgctatcgtagttgacaacattttggccgagcaaggcgggaaaagattggttcctgtaggtttaggggatgatgaccagtgtatcgaagacgatttcgcagcatggagagaaaatgtttggccggagcttgacaatttgttacgaaatgaggacgatgcaagtacagtatcgactccctatactgcagcggtgttggagtacagggtggagttccacgaccaaagtgacgagttatctttggagaactctctcgccaacggtcatgctaacggtaatgcctcatatgacgctcagcacccttgtagagcaaatgttgccgttaaaagagaattgcatacaccattatccgatagatcatgtacccaccttgaatttgacatatcaggcacaggcttacaatatgaaaccggtgatcatgtaggcgtttattgtgagaatctaattgagactgtcgaagaagctgaaagactgttgggtttgagcccacagacttattttagtgttcacaccgacaaagaagatggaactccccttggtggtagcgcacttcctccacctttcccaccctgtactttaaggacggccttatctcgatatgcggatttgttgaatgcccctaaaaagagtgcactgacagctcttgctgcttacgcgagtgaccctacggaagctgacagattaaaacacctagcttcacctgccggaaaggaagaatatgcccaatatgttgtggcttcccaaaggaccctactagaagtaatggccgatttcccatcggcaaagccacctctaggtgtgtttttcgcgggtgtcgccccaagattgcagcctagattttattccatttcttcttccccaaagattgctcccttcaggattcatgtaacctgcgctttggtgtatgacaaaactccaactggaagaatccataaaggtatctgttctacgtggataaagaatgctgtacctttggaggagagctcggattgttcgtcagctcctatctttgttcggaatagcaattttaaattaccatctgacgcaaacataccaattatcatgatcggtccaggcactgggctagcaccattcaggggttttttacaagaacgcctggctttaaaagagtccggtgcagaactgggcccagccattttgttctttggatgtcgtaacaggaaaatggacttcatatatgaagatgaactgaacgattttgtaaaggctggtgttgtgagtgagttgattgttgcctttagcagagaaggatcaactaaagaatacgttcaacacaagatggcacaacgtgcatctgacgtatggaaaatgatcagcgatggaggttacatttacgtctgcggcgacgcaaagggtatggctagagatgtacataggactttgcacaccatcgcccaagaacaaggctcaatgtcctcatccgaagccgagggtatggtaaaaaatttacaaatgacaggaaggtatctccgtgacgtctgg

SEQ ID NO: 1441 - DNA, 3462 bp, Artificial Sequence
  G8H-CPR engineered fusion
atggactacctcaccctggtcctcggcctgcttttcgccctcacattctaccagggcctcagctacctgtcccgaaagagtaagaaactcccccctggtcccgcaccgcttccttttatcggaaacctccacctgttgggtgaccagccccataagtctctggctaagctctctaagaagcatggccctctaatgagtctcaagttgggacacatcaccacggtcgtcatttcctcttctggaatggcgaaagaagttctccagaaacaggatctagcattttcttcacgttcggtccctgacgctttgcatgctcataaccaattccagttttcagtggtttggctgcctgttgcctcccgatggaggtccctgcgcaagattctgaactctaacatcttttcaggaaaccgcctggatgcaaaccagcacctgcgatgccgcaaggtccaggaattaatcgcctattgccgaaaaaactgccagactggcgaggccgttgatgtgggacgagccgcctttcgaacctcgcttaacctcctctccaacaccattttctcaaaggatctgaccgatccgtactcagactctgccaaggagtttaaggacttggtctggaacattatggtcgaggcaggtaagcccaatctggtggactttttccctgtcctcgagaaggtggacccccagggaatccgaaagagaatgaccgtacacttcggtaaggtccttaagctgtttaatggattgattaacgagagactggaacagaagagactccagtcaggtaacaacgatgtgttggacgtactgctgacaacttctgaagaatctcctgaggagatcgatcggacccatatcgagagaatgtgccttgatctgtttgtggctgggactgacaccacatcatccacgctagagtgggcaatggcagaaatgttaaagaaccctgacaaaatgcagaagactcaggccgagatcgccgaggtaattggaaaggggaaggctatcgaggaggccgatgttgcccgattgccctaccttcgatgtgttgtgaaagagaccctgagaatccaccctcccgtgcctttcctgattcctcgaaaggtcgaccaagacgtcgaggtgtgtggatacaaggtccctaaaggctcccaggttctcgtcaacgcctgggccatcggacgagatggaactgtttgggaggatccactcgcgttcaagccggagcgttttttcgaatcagaaatcgacattagaggcagggactttgaggtcatcccatttggagcaggccggcgcatttgtcctggcctgcctttagcagctcgaatggtgcccgtcatgctgggctctctgctgaactcgtttaactggaagctggagggaggcatcgcccccaaggatcttgacatggatgagaagttcggcattaccttgcagaaggctcatccactcagagctgtcccttcccctctaggtggcggctctggcggaagcacatctagcggtagttccggtggttggagacggtcctccggatctggtaaaaaggttgttgaaccacctaaactaatcgtgccaaaaagtgttgtcgaaccagaggaaatcgatgaaggtaagaaaaagtttactatattttttggcacccagacaggtacggctgagggcttcgcaaaggcactagccgaggaagctaaagctaggtatgaaaaggcagtcattaaggttatcgatatagacgattatgcggctgatgacgaggaatatgaagaaaaatttaggaaggaaacgttagcttttttcattctggctacttacggcgatggtgaaccaacagacaatgcagccagattctacaagtggtttgttgaagggaatgacaggggtgattggttaaaaaatttgcaatacggtgtttttggcctcgggaatcgccagtacgaacatttcaataagatagccaaagtggtagatgagaaggttgcggaacaaggtggcaaacgtatcgtccccttagttttaggcgatgacgatcagtgtattgaagacgatttcgcggcatggcgtgaaaatgtttggcccgaacttgataatcttcttagagacgaagacgatactactgtttcaacaacctacacggccgcaatccccgaatacagagttgttttcccagataagtcagatagcttaatttcagaagcaaatggtcacgctaatggttatgctaatgggaatacggtctacgatgctcaacacccatgcagatctaatgttgcagtccgcaaggagttacacactccagcatcagatcgctcatgtactcatcttgatttcgatatcgctggcaccggattgagctacgggactggagatcatgtaggtgtctattgtgataatttatctgaaaccgtcgaggaagctgagaggttgcttaatctgccgcctgaaacgtattttagcctccacgctgataaggaagacggcacacctttggcaggatcttctttgcctcctccctttccaccttgtacattacggactgctttgactaggtatgcggatttgctgaacacccccaaaaagagcgctttgctggccttagctgcatatgcttccgatcctaatgaagccgatagactaaaatacctagccagtcccgctggcaaggacgagtacgcacaatctcttgtcgctaaccaaagatcgcttttagaggtaatggccgagtttccctctgcaaaaccaccacttggggtttttttcgcggctattgctcctcgtcttcaaccaaggttctattcaatttcctctagtccgcgtatggctcctagtagaatccatgttacatgtgcattagtctacgaaaagactccaggtggtagaattcataagggagtttgttctacttggatgaaaaatgctattccgctggaagaatcacgtgactgctcgtgggcccccatctttgtacgtcaaagtaattttaagcttcctgcagaccctaaggtgccagtgataatgataggtccaggtaccggcttggctcctttcagaggattcttacaggaaaggttagctttgaaggaagaaggcgcagaattgggtactgctgtgttcttctttggttgtcgtaacagaaaaatggactacatttacgaagatgagctaaaccatttcttagaaattggtgccttgtccgaactattagtcgccttcagcagggagggccctacgaagcaatacgttcagcataaaatggctgaaaaagcgtcagacatttggcgaatgataagtgatggtgcctatgtgtatgtgtgcggggatgcaaagggtatggctcgtgatgtccacagaacactacatactatcgcccaagagcaaggctcgatggattctacacaagctgaaggttttgtaaagaatctacaaatgacgggtaggtacctaagagatgtttgg

SEQ ID NO: 1442 - DNA, 3450 bp, Artificial Sequence
  G8H-CPR engineered fusion
atggattatttaacaattattctgacacttttgtttgcattaaccttgtatgaggcctttagctaccttagcaggcgtacaaagaatcttccccctggtccatccccattaccattcataggttctctgcatttgttgggtgatcaaccgcataaatcgctcgctaaactaagcaaaaagcacggccctataatgtccttgaaactgggtcaaattaccaccattgtaatatcatcctctaccatggccaaagaagtactacagaagcaagacttggcattctcttctcgatcagtacctaacgctttgcatgcccataatcaatttaaatttagtgtagtgtggctaccagtagcatctaggtggagatcattgagaaaggtattaaatagcaacatcttttctggtaaccgcttggatgccaaccagcatctcaggactcgaaaggtgcaagaattgatagcgtactgtagaaaaaattctcaatctggagaggctgtggacgtcggtagggcggctttccggacatcgttgaatttgttgtccaacctaattttctcgaaagatttgacagatccatactccgatagcgctaaagaatttaaagatttggtatggaatattatggttgaagccggaaaacctaacttagtggatttttttccgttattagaaaaagtcgatccacagggtattagacatagaatgactatacactttggtgaagtactgaaactgttcggtgggttggtaaatgaaaggttagagcaaagaagatctaaaggtgaaaaaaacgacgtattagatgtattgctaactactagtcaagaaagtcccgaggaaattgatcgaacgcatattgaacgtatgtgtttggatttgttcgtggctggtactgacacgacctcatctaccttggaatgggctatgtcagaaatgcttaaaaacccggataaaatgaagaaaacccaggacgaactagctcaagtgataggtcgaggtaaaacaatagaggaaagtgacatcaacagattgccttatttaagatgtgttatgaaggaaaccctgagaattcatcctcctgttccctttttgatacctcgcaaggttgagcaatctgtagaagtttgcggttataatgtgccaaagggatctcaagtactagtcaacgcatgggcaattgggcgagatgagaccgtttgggatgacgctttagcattcaagcctgaaagatttatggaaagcgaattggacataaggggcagagattttgagttaatcccttttggtgctggcagacgtatatgtccgggccttcctctcgcgttgagaactgttccattgatgttgggttcattacttaactctttcaattggaaacttgaaggaggtatggccccaaaagatttggacatggaagaaaaatttggtataacgttgcaaaaagcgcatcctctaagagcggtcccatctactttaggtggcggctctggcggaagcacatctagcggtagttccggtggttggaagaaaaccacagctgatcgctcaggcgagttaaaaccattaatgattcccaaatcactgatggcaaaggatgaagacgatgatttggacctagggtcaggtaagacaagggtgtccatcttctttggaactcaaacgggtactgctgaggggttcgcaaaggctctatcggaagaaataaaagctaggtacgaaaaagcagccgtcaaagacgattacgccgctgatgatgaccaatacgaagaaaaattgaaaaaagaaacattagccttcttctgcgtcgcaacttatggtgacggcgaaccaacagataatgcggctagattctacaaatggttcacggaagagaatgagagagatattaaattgcaacaactggcttacggtgtttttgcacttggaaacaggcagtacgaacattttaacaagattggaattgttttggatgaggagttgtgtaaaaagggagctaagagattgatagaagtgggcttgggagatgatgatcagtcaattgaggatgatttcaacgcatggaaggaaagcttgtggtctgagttggataagctccttaaggatgaagatgataaatcggtcgcgaccccttatactgctgtcataccggaatacagggtggtaactcatgaccctaggtttactacacagaagagtatggaatccaatgtggcgaatggtaacaccacaattgatatccatcatccatgtagagttgatgtggctgtccagaaagaattgcatacccatgaatcggacaggtcatgtattcatttggaattcgacatttcacgtacaggtattacttatgaaactggcgatcacgtgggcgtctacgctgagaatcacgtcgaaattgttgaggaagcaggaaaattgctgggacattcactagaccttgttttttcgatacatgcagataaggaagatggaagtccgttggaatctgcagtccctcctcctttcccaggaccatgtaccttgggtactggtttggccagatatgcagatctccttaatcctccccggaaaagcgcattggtggctttggctgcctatgcaactgaaccttcagaagctgaaaaacttaaacatctaacatccccagatggaaaggacgaatatagtcagtggatcgtggcgagtcaacgctcacttttagaagttatggcggcatttccaagcgctaaaccaccactgggtgttttctttgccgcaatagctcctagattacaacccagatattactctatctcatcctctccacgattagctccttctagagttcacgtcacttctgctttggtctacggtccaacgccaacaggtcgaattcataaaggtgtatgcagtacatggatgaagaatgctgttcctgctgagaaatcgcacgaatgttccggtgcccctatttttatcagagccagcaacttcaaattgccatctaatccgtctactcccattgttatggtaggtccgggtactggccttgccccgttcagaggttttttgcaagagcgaatggccttgaaggaagacggggaagagttaggttcttccctattatttttcggctgccggaatcgacaaatggactttatttatgaagatgaattgaacaactttgtggatcaaggagttatttccgaattgattatggcgttctctagagaaggtgcacaaaaagaatacgtccaacataaaatgatggaaaaggcagctcaagtatgggatctaattaaagaagaaggatatttatacgtatgtggggatgcaaaaggtatggccagagatgttcataggactttgcacactatcgtccaagaacaagaaggtgtctcatctagtgaagctgaagcgattgttaaaaaattacaaacagaaggcagatatttgagggatgtttgg

SEQ ID NO: 1443 - DNA, 3462 bp, Artificial Sequence
  G8H-CPR engineered fusion
atggattatttaacaattattctgacacttttgtttgcattaaccttgtatgaggcctttagctaccttagcaggcgtacaaagaatcttccccctggtccatccccattaccattcataggttctctgcatttgttgggtgatcaaccgcataaatcgctcgctaaactaagcaaaaagcacggccctataatgtccttgaaactgggtcaaattaccaccattgtaatatcatcctctaccatggccaaagaagtactacagaagcaagacttggcattctcttctcgatcagtacctaacgctttgcatgcccataatcaatttaaatttagtgtagtgtggctaccagtagcatctaggtggagatcattgagaaaggtattaaatagcaacatcttttctggtaaccgcttggatgccaaccagcatctcaggactcgaaaggtgcaagaattgatagcgtactgtagaaaaaattctcaatctggagaggctgtggacgtcggtagggcggctttccggacatcgttgaatttgttgtccaacctaattttctcgaaagatttgacagatccatactccgatagcgctaaagaatttaaagatttggtatggaatattatggttgaagccggaaaacctaacttagtggatttttttccgttattagaaaaagtcgatccacagggtattagacatagaatgactatacactttggtgaagtactgaaactgttcggtgggttggtaaatgaaaggttagagcaaagaagatctaaaggtgaaaaaaacgacgtattagatgtattgctaactactagtcaagaaagtcccgaggaaattgatcgaacgcatattgaacgtatgtgtttggatttgttcgtggctggtactgacacgacctcatctaccttggaatgggctatgtcagaaatgcttaaaaacccggataaaatgaagaaaacccaggacgaactagctcaagtgataggtcgaggtaaaacaatagaggaaagtgacatcaacagattgccttatttaagatgtgttatgaaggaaaccctgagaattcatcctcctgttccctttttgatacctcgcaaggttgagcaatctgtagaagtttgcggttataatgtgccaaagggatctcaagtactagtcaacgcatgggcaattgggcgagatgagaccgtttgggatgacgctttagcattcaagcctgaaagatttatggaaagcgaattggacataaggggcagagattttgagttaatcccttttggtgctggcagacgtatatgtccgggccttcctctcgcgttgagaactgttccattgatgttgggttcattacttaactctttcaattggaaacttgaaggaggtatggccccaaaagatttggacatggaagaaaaatttggtataacgttgcaaaaagcgcatcctctaagagcggtcccatctactttaggtggcggctctggcggaagcacatctagcggtagttccggtggttggagacgctcgtcagatagatctaaagaaagcaacccagttgttgtacctagacctttactggtagaagctgaagaagatgaggtggaagtcggttctggaaaaacaaaattgacaattttctacggtacacagaccggtactgcggaaggtttcgctaaggctctagcagaagagatcaaggctcgttacgaaaaagccgttgtaaaagtcgtcgacctagatgactatgccgacgatgacgaacaatatgaggaaaagttgaaaaaggaaacgctggctttctttatggttgctacttatggggacggtgaaccgacagacaatgccgctagattctataagtggtttaccgacggcaaagaaagaggtttgtggttacagcaattgaaatttggtgtgtttggtctaggtaatagacagtatgagcattttaataagatagggaaggttttagaccaggatttaagtgaacaagggggtaaacgattgattccagtaggactaggagatgatgaccagtgcattgaagacgattttgccgcctggcgggaacttttgtggcctgaattagatcagttgcttagggatggtgacgacactaacaccgtgagtaccccctatactgccgtcatccctgagtacagagtcgtcatatacgatccgacaactacctcattcgaagacaagcatctatcaatggcaaatgggaatgcctcttacgacatccaccacccatgtcgcgttaatgtagctgttcaaagagaactgcataagccagagtctgatcgatcatgtatccatttggaattcgatatatcctctacagggatcacatatgagaccggtgatcatgtaggcgtgtacgccgacaactgtgatgaaactgtagaagaagctgcccgattgttgggccagcctttggatctacttttttccattcattccgacgacgataacggtactcccctaggtggtagtctgccgccaccttttccaggcccttgtaccttaaggacagctttggctagatatgccgacttattgaatccaccacgaaaagctgcccttattgcccttgcagcccatgccattgaaccatcagaatcggaaaaattaaaattcttgagttcgccacaaggaaaagacgattactctcaatgggtcgttgggtctcaacgtagtctattggaagttatggctgaatttcccagcgcaaagccaccattgggtgttttcttcgccgcagttgctactagattacagccaagatattattcaattagcagttctcctagatttgcaccttctagagttcatgttacttgctctttagtttacggtcccacatcaaccggacgtattcacaaaggagtttgttcaacctggatgaagaatgctgtaccattagaaaagtcacgcaactgttcatgggccccaatttttattcgtgcttcaaacttcaaattacctagcaacccaagtattcctatagtgatggttggtccaggcactggcttagcacctttcagaggcttcttacaagagagattggccctgaaggaagacggtattcaattgggtccagccttgcttttttttggttgcagaaatagaaggatggattttatatatgaggacgagttaaataacttcgtggaccgcggtgttcttagtgacttaattgtcgcctttagtagagagggtccgcagaaagaatatgttcaacacaagatgatggaaaaagcggcttacatttggaatctaatttctcaggaaggctatctatatgtatgcggcgatgccaagggaatggctcgagatgttcatagaactcttcataccattgtccaagaacaagaaaatgctgatacttcaaaggccgaatcggttgtgaaaaaacttcaaatggacgggcgctatttgagagatgtgtgg

SEQ ID NO: 1444 - DNA, 3462 bp, Artificial Sequence
  G8H-CPR engineered fusion
atggattatttaacaattattctgacacttttgtttgcattaaccttgtatgaggcctttagctaccttagcaggcgtacaaagaatcttccccctggtccatccccattaccattcataggttctctgcatttgttgggtgatcaaccgcataaatcgctcgctaaactaagcaaaaagcacggccctataatgtccttgaaactgggtcaaattaccaccattgtaatatcatcctctaccatggccaaagaagtactacagaagcaagacttggcattctcttctcgatcagtacctaacgctttgcatgcccataatcaatttaaatttagtgtagtgtggctaccagtagcatctaggtggagatcattgagaaaggtattaaatagcaacatcttttctggtaaccgcttggatgccaaccagcatctcaggactcgaaaggtgcaagaattgatagcgtactgtagaaaaaattctcaatctggagaggctgtggacgtcggtagggcggctttccggacatcgttgaatttgttgtccaacctaattttctcgaaagatttgacagatccatactccgatagcgctaaagaatttaaagatttggtatggaatattatggttgaagccggaaaacctaacttagtggatttttttccgttattagaaaaagtcgatccacagggtattagacatagaatgactatacactttggtgaagtactgaaactgttcggtgggttggtaaatgaaaggttagagcaaagaagatctaaaggtgaaaaaaacgacgtattagatgtattgctaactactagtcaagaaagtcccgaggaaattgatcgaacgcatattgaacgtatgtgtttggatttgttcgtggctggtactgacacgacctcatctaccttggaatgggctatgtcagaaatgcttaaaaacccggataaaatgaagaaaacccaggacgaactagctcaagtgataggtcgaggtaaaacaatagaggaaagtgacatcaacagattgccttatttaagatgtgttatgaaggaaaccctgagaattcatcctcctgttccctttttgatacctcgcaaggttgagcaatctgtagaagtttgcggttataatgtgccaaagggatctcaagtactagtcaacgcatgggcaattgggcgagatgagaccgtttgggatgacgctttagcattcaagcctgaaagatttatggaaagcgaattggacataaggggcagagattttgagttaatcccttttggtgctggcagacgtatatgtccgggccttcctctcgcgttgagaactgttccattgatgttgggttcattacttaactctttcaattggaaacttgaaggaggtatggccccaaaagatttggacatggaagaaaaatttggtataacgttgcaaaaagcgcatcctctaagagcggtcccatctactttaggtggcggctctggcggaagcacatctagcggtagttccggtggttggcgaaagggtgccggttctgcaaagaaagttgtcgaacctccaaaactagttttaccaaaagctctctcagaaaccgaggaggtggacgacggaaaaaagaaggtcactattttttttggtacccaaactggtactgcagaaggttttgcgaaagctcttgcagaagaagccaaagcgagatatccacaagctaatttcaaagtcgtggatatggatgactatgcagcggaggacgaagagtacgaagagaaattgaccaaagagactatggctttttttttccttgcaacctacggtgatggtgagccaactgacaatgctgcacgcttttacaagtggttcgccgaaggtaaggaacgaggtgattcatttaaaaatttacattatggtgtgtttggtttgggaaatagacaatatgagcatttcaacaaaattgctatcgtagttgacaacattttggccgagcaaggcgggaaaagattggttcctgtaggtttaggggatgatgaccagtgtatcgaagacgatttcgcagcatggagagaaaatgtttggccggagcttgacaatttgttacgaaatgaggacgatgcaagtacagtatcgactccctatactgcagcggtgttggagtacagggtggagttccacgaccaaagtgacgagttatctttggagaactctctcgccaacggtcatgctaacggtaatgcctcatatgacgctcagcacccttgtagagcaaatgttgccgttaaaagagaattgcatacaccattatccgatagatcatgtacccaccttgaatttgacatatcaggcacaggcttacaatatgaaaccggtgatcatgtaggcgtttattgtgagaatctaattgagactgtcgaagaagctgaaagactgttgggtttgagcccacagacttattttagtgttcacaccgacaaagaagatggaactccccttggtggtagcgcacttcctccacctttcccaccctgtactttaaggacggccttatctcgatatgcggatttgttgaatgcccctaaaaagagtgcactgacagctcttgctgcttacgcgagtgaccctacggaagctgacagattaaaacacctagcttcacctgccggaaaggaagaatatgcccaatatgttgtggcttcccaaaggaccctactagaagtaatggccgatttcccatcggcaaagccacctctaggtgtgtttttcgcgggtgtcgccccaagattgcagcctagattttattccatttcttcttccccaaagattgctcccttcaggattcatgtaacctgcgctttggtgtatgacaaaactccaactggaagaatccataaaggtatctgttctacgtggataaagaatgctgtacctttggaggagagctcggattgttcgtcagctcctatctttgttcggaatagcaattttaaattaccatctgacgcaaacataccaattatcatgatcggtccaggcactgggctagcaccattcaggggttttttacaagaacgcctggctttaaaagagtccggtgcagaactgggcccagccattttgttctttggatgtcgtaacaggaaaatggacttcatatatgaagatgaactgaacgattttgtaaaggctggtgttgtgagtgagttgattgttgcctttagcagagaaggatcaactaaagaatacgttcaacacaagatggcacaacgtgcatctgacgtatggaaaatgatcagcgatggaggttacatttacgtctgcggcgacgcaaagggtatggctagagatgtacataggactttgcacaccatcgcccaagaacaaggctcaatgtcctcatccgaagccgagggtatggtaaaaaatttacaaatgacaggaaggtatctccgtgacgtctgg

SEQ ID NO: 1445 - DNA, 3462 bp, Artificial Sequence
  G8H-CPR engineered fusion
atggattatttaacaattattctgacacttttgtttgcattaaccttgtatgaggcctttagctaccttagcaggcgtacaaagaatcttccccctggtccatccccattaccattcataggttctctgcatttgttgggtgatcaaccgcataaatcgctcgctaaactaagcaaaaagcacggccctataatgtccttgaaactgggtcaaattaccaccattgtaatatcatcctctaccatggccaaagaagtactacagaagcaagacttggcattctcttctcgatcagtacctaacgctttgcatgcccataatcaatttaaatttagtgtagtgtggctaccagtagcatctaggtggagatcattgagaaaggtattaaatagcaacatcttttctggtaaccgcttggatgccaaccagcatctcaggactcgaaaggtgcaagaattgatagcgtactgtagaaaaaattctcaatctggagaggctgtggacgtcggtagggcggctttccggacatcgttgaatttgttgtccaacctaattttctcgaaagatttgacagatccatactccgatagcgctaaagaatttaaagatttggtatggaatattatggttgaagccggaaaacctaacttagtggatttttttccgttattagaaaaagtcgatccacagggtattagacatagaatgactatacactttggtgaagtactgaaactgttcggtgggttggtaaatgaaaggttagagcaaagaagatctaaaggtgaaaaaaacgacgtattagatgtattgctaactactagtcaagaaagtcccgaggaaattgatcgaacgcatattgaacgtatgtgtttggatttgttcgtggctggtactgacacgacctcatctaccttggaatgggctatgtcagaaatgcttaaaaacccggataaaatgaagaaaacccaggacgaactagctcaagtgataggtcgaggtaaaacaatagaggaaagtgacatcaacagattgccttatttaagatgtgttatgaaggaaaccctgagaattcatcctcctgttccctttttgatacctcgcaaggttgagcaatctgtagaagtttgcggttataatgtgccaaagggatctcaagtactagtcaacgcatgggcaattgggcgagatgagaccgtttgggatgacgctttagcattcaagcctgaaagatttatggaaagcgaattggacataaggggcagagattttgagttaatcccttttggtgctggcagacgtatatgtccgggccttcctctcgcgttgagaactgttccattgatgttgggttcattacttaactctttcaattggaaacttgaaggaggtatggccccaaaagatttggacatggaagaaaaatttggtataacgttgcaaaaagcgcatcctctaagagcggtcccatctactttaggtggcggctctggcggaagcacatctagcggtagttccggtggttggagacggtcctccggatctggtaaaaaggttgttgaaccacctaaactaatcgtgccaaaaagtgttgtcgaaccagaggaaatcgatgaaggtaagaaaaagtttactatattttttggcacccagacaggtacggctgagggcttcgcaaaggcactagccgaggaagctaaagctaggtatgaaaaggcagtcattaaggttatcgatatagacgattatgcggctgatgacgaggaatatgaagaaaaatttaggaaggaaacgttagcttttttcattctggctacttacggcgatggtgaaccaacagacaatgcagccagattctacaagtggtttgttgaagggaatgacaggggtgattggttaaaaaatttgcaatacggtgtttttggcctcgggaatcgccagtacgaacatttcaataagatagccaaagtggtagatgagaaggttgcggaacaaggtggcaaacgtatcgtccccttagttttaggcgatgacgatcagtgtattgaagacgatttcgcggcatggcgtgaaaatgtttggcccgaacttgataatcttcttagagacgaagacgatactactgtttcaacaacctacacggccgcaatccccgaatacagagttgttttcccagataagtcagatagcttaatttcagaagcaaatggtcacgctaatggttatgctaatgggaatacggtctacgatgctcaacacccatgcagatctaatgttgcagtccgcaaggagttacacactccagcatcagatcgctcatgtactcatcttgatttcgatatcgctggcaccggattgagctacgggactggagatcatgtaggtgtctattgtgataatttatctgaaaccgtcgaggaagctgagaggttgcttaatctgccgcctgaaacgtattttagcctccacgctgataaggaagacggcacacctttggcaggatcttctttgcctcctccctttccaccttgtacattacggactgctttgactaggtatgcggatttgctgaacacccccaaaaagagcgctttgctggccttagctgcatatgcttccgatcctaatgaagccgatagactaaaatacctagccagtcccgctggcaaggacgagtacgcacaatctcttgtcgctaaccaaagatcgcttttagaggtaatggccgagtttccctctgcaaaaccaccacttggggtttttttcgcggctattgctcctcgtcttcaaccaaggttctattcaatttcctctagtccgcgtatggctcctagtagaatccatgttacatgtgcattagtctacgaaaagactccaggtggtagaattcataagggagtttgttctacttggatgaaaaatgctattccgctggaagaatcacgtgactgctcgtgggcccccatctttgtacgtcaaagtaattttaagcttcctgcagaccctaaggtgccagtgataatgataggtccaggtaccggcttggctcctttcagaggattcttacaggaaaggttagctttgaaggaagaaggcgcagaattgggtactgctgtgttcttctttggttgtcgtaacagaaaaatggactacatttacgaagatgagctaaaccatttcttagaaattggtgccttgtccgaactattagtcgccttcagcagggagggccctacgaagcaatacgttcagcataaaatggctgaaaaagcgtcagacatttggcgaatgataagtgatggtgcctatgtgtatgtgtgcggggatgcaaagggtatggctcgtgatgtccacagaacactacatactatcgcccaagagcaaggctcgatggattctacacaagctgaaggttttgtaaagaatctacaaatgacgggtaggtacctaagagatgtttgg

SEQ ID NO: 1446 - DNA, 3447 bp, Artificial Sequence
  G8H-CPR engineered fusion
atggattttttgactattttcattggcccattattagcaataattgcactattttacgccaggttaaccattagcactcggggtaagaatttaccaccaggtcctactccactaccttttattggtaatttacatttgctaggtcatcacccacataagtctttggcgagacttgctaaaacttatggaccgttgatgctgctaagattagggtctgaaaatactgtagtagtgagttctgcagccgttgcaaaggaggtattacaaaagcatgatttagctttttcatctagatccataccagatgcggttcatgctcacgatcagttcaaatactctgtcgtctggttacctgtggcatctcggtggcgatcacttagaaaaactatgaattcgaatattttcagcggttcatgcttagatgctaatcaacatttgcgaagtagaaaagttgaagaattgatagcgtattgcaaagaaagttgccgtcgagctgaggctgtcgatgttggaagagctgcattcagaactgctttgaactccctgtccaacaccattttctcgagggatctggcagatcctctgtccgactctggaaaagaatttaaggatgttgtatcttccataatgatggaagcaggcaaacctaacagtgtagactattacccctttctatccagattcgatccccagggaataagaagacgtactgccatttattttgataaattaataaatattttcaaagggttgattgacgagagattggaaaaacgtaggagtcagtacgaggaagcgacagacgtcattgacatacttttgaacacaatcgaacaaaacccggaggaaatcgaccgtactcatattgaaaggatgtttttggacctatttcttgccggtacagatacgaccagtagtacggtcgagtgggccatggctgaggccatgaagaacccggaaactatgaaaaaagctaaagctgagctggcacaggtaattggcaaaggtaaaattgtacaagaaactgatatcccacatttgccatatttgcaatgtattgtgaaggaaactcttcgcttacatccgccggtcccatttcttatacctcgacgcgtacatgaagatgttgacatcttgggttatgttgttcctaataactcacaagtattcgtcaacatgtgggccattggccgcgatccagatatgtggaagaatccactacaatttgatcctgatagattccatgattcagaagtgggtctaagaggtaaagacttcgaacttataccatttggtgctgggcgtagaatctgcccaggattacctttagcaatgagaatggttccagttgttttgggctcactattgaattcatttgattggaaagtcgaaggcggcaaggaattggaaatgaacgaaaagtttggtatcacattggaaaaggcacaacccttgatggcggtaccaattgcactaggtggcggctctggcggaagcacatctagcggtagttccggtggttggaagaaaaccacagctgatcgctcaggcgagttaaaaccattaatgattcccaaatcactgatggcaaaggatgaagacgatgatttggacctagggtcaggtaagacaagggtgtccatcttctttggaactcaaacgggtactgctgaggggttcgcaaaggctctatcggaagaaataaaagctaggtacgaaaaagcagccgtcaaagacgattacgccgctgatgatgaccaatacgaagaaaaattgaaaaaagaaacattagccttcttctgcgtcgcaacttatggtgacggcgaaccaacagataatgcggctagattctacaaatggttcacggaagagaatgagagagatattaaattgcaacaactggcttacggtgtttttgcacttggaaacaggcagtacgaacattttaacaagattggaattgttttggatgaggagttgtgtaaaaagggagctaagagattgatagaagtgggcttgggagatgatgatcagtcaattgaggatgatttcaacgcatggaaggaaagcttgtggtctgagttggataagctccttaaggatgaagatgataaatcggtcgcgaccccttatactgctgtcataccggaatacagggtggtaactcatgaccctaggtttactacacagaagagtatggaatccaatgtggcgaatggtaacaccacaattgatatccatcatccatgtagagttgatgtggctgtccagaaagaattgcatacccatgaatcggacaggtcatgtattcatttggaattcgacatttcacgtacaggtattacttatgaaactggcgatcacgtgggcgtctacgctgagaatcacgtcgaaattgttgaggaagcaggaaaattgctgggacattcactagaccttgttttttcgatacatgcagataaggaagatggaagtccgttggaatctgcagtccctcctcctttcccaggaccatgtaccttgggtactggtttggccagatatgcagatctccttaatcctccccggaaaagcgcattggtggctttggctgcctatgcaactgaaccttcagaagctgaaaaacttaaacatctaacatccccagatggaaaggacgaatatagtcagtggatcgtggcgagtcaacgctcacttttagaagttatggcggcatttccaagcgctaaaccaccactgggtgttttctttgccgcaatagctcctagattacaacccagatattactctatctcatcctctccacgattagctccttctagagttcacgtcacttctgctttggtctacggtccaacgccaacaggtcgaattcataaaggtgtatgcagtacatggatgaagaatgctgttcctgctgagaaatcgcacgaatgttccggtgcccctatttttatcagagccagcaacttcaaattgccatctaatccgtctactcccattgttatggtaggtccgggtactggccttgccccgttcagaggttttttgcaagagcgaatggccttgaaggaagacggggaagagttaggttcttccctattatttttcggctgccggaatcgacaaatggactttatttatgaagatgaattgaacaactttgtggatcaaggagttatttccgaattgattatggcgttctctagagaaggtgcacaaaaagaatacgtccaacataaaatgatggaaaaggcagctcaagtatgggatctaattaaagaagaaggatatttatacgtatgtggggatgcaaaaggtatggccagagatgttcataggactttgcacactatcgtccaagaacaagaaggtgtctcatctagtgaagctgaagcgattgttaaaaaattacaaacagaaggcagatatttgagggatgtttgg

SEQ ID NO: 1447 - DNA, 3459 bp, Artificial Sequence
  G8H-CPR engineered fusion
atggattttttgactattttcattggcccattattagcaataattgcactattttacgccaggttaaccattagcactcggggtaagaatttaccaccaggtcctactccactaccttttattggtaatttacatttgctaggtcatcacccacataagtctttggcgagacttgctaaaacttatggaccgttgatgctgctaagattagggtctgaaaatactgtagtagtgagttctgcagccgttgcaaaggaggtattacaaaagcatgatttagctttttcatctagatccataccagatgcggttcatgctcacgatcagttcaaatactctgtcgtctggttacctgtggcatctcggtggcgatcacttagaaaaactatgaattcgaatattttcagcggttcatgcttagatgctaatcaacatttgcgaagtagaaaagttgaagaattgatagcgtattgcaaagaaagttgccgtcgagctgaggctgtcgatgttggaagagctgcattcagaactgctttgaactccctgtccaacaccattttctcgagggatctggcagatcctctgtccgactctggaaaagaatttaaggatgttgtatcttccataatgatggaagcaggcaaacctaacagtgtagactattacccctttctatccagattcgatccccagggaataagaagacgtactgccatttattttgataaattaataaatattttcaaagggttgattgacgagagattggaaaaacgtaggagtcagtacgaggaagcgacagacgtcattgacatacttttgaacacaatcgaacaaaacccggaggaaatcgaccgtactcatattgaaaggatgtttttggacctatttcttgccggtacagatacgaccagtagtacggtcgagtgggccatggctgaggccatgaagaacccggaaactatgaaaaaagctaaagctgagctggcacaggtaattggcaaaggtaaaattgtacaagaaactgatatcccacatttgccatatttgcaatgtattgtgaaggaaactcttcgcttacatccgccggtcccatttcttatacctcgacgcgtacatgaagatgttgacatcttgggttatgttgttcctaataactcacaagtattcgtcaacatgtgggccattggccgcgatccagatatgtggaagaatccactacaatttgatcctgatagattccatgattcagaagtgggtctaagaggtaaagacttcgaacttataccatttggtgctgggcgtagaatctgcccaggattacctttagcaatgagaatggttccagttgttttgggctcactattgaattcatttgattggaaagtcgaaggcggcaaggaattggaaatgaacgaaaagtttggtatcacattggaaaaggcacaacccttgatggcggtaccaattgcactaggtggcggctctggcggaagcacatctagcggtagttccggtggttggagacgctcgtcagatagatctaaagaaagcaacccagttgttgtacctagacctttactggtagaagctgaagaagatgaggtggaagtcggttctggaaaaacaaaattgacaattttctacggtacacagaccggtactgcggaaggtttcgctaaggctctagcagaagagatcaaggctcgttacgaaaaagccgttgtaaaagtcgtcgacctagatgactatgccgacgatgacgaacaatatgaggaaaagttgaaaaaggaaacgctggctttctttatggttgctacttatggggacggtgaaccgacagacaatgccgctagattctataagtggtttaccgacggcaaagaaagaggtttgtggttacagcaattgaaatttggtgtgtttggtctaggtaatagacagtatgagcattttaataagatagggaaggttttagaccaggatttaagtgaacaagggggtaaacgattgattccagtaggactaggagatgatgaccagtgcattgaagacgattttgccgcctggcgggaacttttgtggcctgaattagatcagttgcttagggatggtgacgacactaacaccgtgagtaccccctatactgccgtcatccctgagtacagagtcgtcatatacgatccgacaactacctcattcgaagacaagcatctatcaatggcaaatgggaatgcctcttacgacatccaccacccatgtcgcgttaatgtagctgttcaaagagaactgcataagccagagtctgatcgatcatgtatccatttggaattcgatatatcctctacagggatcacatatgagaccggtgatcatgtaggcgtgtacgccgacaactgtgatgaaactgtagaagaagctgcccgattgttgggccagcctttggatctacttttttccattcattccgacgacgataacggtactcccctaggtggtagtctgccgccaccttttccaggcccttgtaccttaaggacagctttggctagatatgccgacttattgaatccaccacgaaaagctgcccttattgcccttgcagcccatgccattgaaccatcagaatcggaaaaattaaaattcttgagttcgccacaaggaaaagacgattactctcaatgggtcgttgggtctcaacgtagtctattggaagttatggctgaatttcccagcgcaaagccaccattgggtgttttcttcgccgcagttgctactagattacagccaagatattattcaattagcagttctcctagatttgcaccttctagagttcatgttacttgctctttagtttacggtcccacatcaaccggacgtattcacaaaggagtttgttcaacctggatgaagaatgctgtaccattagaaaagtcacgcaactgttcatgggccccaatttttattcgtgcttcaaacttcaaattacctagcaacccaagtattcctatagtgatggttggtccaggcactggcttagcacctttcagaggcttcttacaagagagattggccctgaaggaagacggtattcaattgggtccagccttgcttttttttggttgcagaaatagaaggatggattttatatatgaggacgagttaaataacttcgtggaccgcggtgttcttagtgacttaattgtcgcctttagtagagagggtccgcagaaagaatatgttcaacacaagatgatggaaaaagcggcttacatttggaatctaatttctcaggaaggctatctatatgtatgcggcgatgccaagggaatggctcgagatgttcatagaactcttcataccattgtccaagaacaagaaaatgctgatacttcaaaggccgaatcggttgtgaaaaaacttcaaatggacgggcgctatttgagagatgtgtgg

SEQ ID NO: 1448 - DNA, 3459 bp, Artificial Sequence
  G8H-CPR engineered fusion
atggattttttgactattttcattggcccattattagcaataattgcactattttacgccaggttaaccattagcactcggggtaagaatttaccaccaggtcctactccactaccttttattggtaatttacatttgctaggtcatcacccacataagtctttggcgagacttgctaaaacttatggaccgttgatgctgctaagattagggtctgaaaatactgtagtagtgagttctgcagccgttgcaaaggaggtattacaaaagcatgatttagctttttcatctagatccataccagatgcggttcatgctcacgatcagttcaaatactctgtcgtctggttacctgtggcatctcggtggcgatcacttagaaaaactatgaattcgaatattttcagcggttcatgcttagatgctaatcaacatttgcgaagtagaaaagttgaagaattgatagcgtattgcaaagaaagttgccgtcgagctgaggctgtcgatgttggaagagctgcattcagaactgctttgaactccctgtccaacaccattttctcgagggatctggcagatcctctgtccgactctggaaaagaatttaaggatgttgtatcttccataatgatggaagcaggcaaacctaacagtgtagactattacccctttctatccagattcgatccccagggaataagaagacgtactgccatttattttgataaattaataaatattttcaaagggttgattgacgagagattggaaaaacgtaggagtcagtacgaggaagcgacagacgtcattgacatacttttgaacacaatcgaacaaaacccggaggaaatcgaccgtactcatattgaaaggatgtttttggacctatttcttgccggtacagatacgaccagtagtacggtcgagtgggccatggctgaggccatgaagaacccggaaactatgaaaaaagctaaagctgagctggcacaggtaattggcaaaggtaaaattgtacaagaaactgatatcccacatttgccatatttgcaatgtattgtgaaggaaactcttcgcttacatccgccggtcccatttcttatacctcgacgcgtacatgaagatgttgacatcttgggttatgttgttcctaataactcacaagtattcgtcaacatgtgggccattggccgcgatccagatatgtggaagaatccactacaatttgatcctgatagattccatgattcagaagtgggtctaagaggtaaagacttcgaacttataccatttggtgctgggcgtagaatctgcccaggattacctttagcaatgagaatggttccagttgttttgggctcactattgaattcatttgattggaaagtcgaaggcggcaaggaattggaaatgaacgaaaagtttggtatcacattggaaaaggcacaacccttgatggcggtaccaattgcactaggtggcggctctggcggaagcacatctagcggtagttccggtggttggcgaaagggtgccggttctgcaaagaaagttgtcgaacctccaaaactagttttaccaaaagctctctcagaaaccgaggaggtggacgacggaaaaaagaaggtcactattttttttggtacccaaactggtactgcagaaggttttgcgaaagctcttgcagaagaagccaaagcgagatatccacaagctaatttcaaagtcgtggatatggatgactatgcagcggaggacgaagagtacgaagagaaattgaccaaagagactatggctttttttttccttgcaacctacggtgatggtgagccaactgacaatgctgcacgcttttacaagtggttcgccgaaggtaaggaacgaggtgattcatttaaaaatttacattatggtgtgtttggtttgggaaatagacaatatgagcatttcaacaaaattgctatcgtagttgacaacattttggccgagcaaggcgggaaaagattggttcctgtaggtttaggggatgatgaccagtgtatcgaagacgatttcgcagcatggagagaaaatgtttggccggagcttgacaatttgttacgaaatgaggacgatgcaagtacagtatcgactccctatactgcagcggtgttggagtacagggtggagttccacgaccaaagtgacgagttatctttggagaactctctcgccaacggtcatgctaacggtaatgcctcatatgacgctcagcacccttgtagagcaaatgttgccgttaaaagagaattgcatacaccattatccgatagatcatgtacccaccttgaatttgacatatcaggcacaggcttacaatatgaaaccggtgatcatgtaggcgtttattgtgagaatctaattgagactgtcgaagaagctgaaagactgttgggtttgagcccacagacttattttagtgttcacaccgacaaagaagatggaactccccttggtggtagcgcacttcctccacctttcccaccctgtactttaaggacggccttatctcgatatgcggatttgttgaatgcccctaaaaagagtgcactgacagctcttgctgcttacgcgagtgaccctacggaagctgacagattaaaacacctagcttcacctgccggaaaggaagaatatgcccaatatgttgtggcttcccaaaggaccctactagaagtaatggccgatttcccatcggcaaagccacctctaggtgtgtttttcgcgggtgtcgccccaagattgcagcctagattttattccatttcttcttccccaaagattgctcccttcaggattcatgtaacctgcgctttggtgtatgacaaaactccaactggaagaatccataaaggtatctgttctacgtggataaagaatgctgtacctttggaggagagctcggattgttcgtcagctcctatctttgttcggaatagcaattttaaattaccatctgacgcaaacataccaattatcatgatcggtccaggcactgggctagcaccattcaggggttttttacaagaacgcctggctttaaaagagtccggtgcagaactgggcccagccattttgttctttggatgtcgtaacaggaaaatggacttcatatatgaagatgaactgaacgattttgtaaaggctggtgttgtgagtgagttgattgttgcctttagcagagaaggatcaactaaagaatacgttcaacacaagatggcacaacgtgcatctgacgtatggaaaatgatcagcgatggaggttacatttacgtctgcggcgacgcaaagggtatggctagagatgtacataggactttgcacaccatcgcccaagaacaaggctcaatgtcctcatccgaagccgagggtatggtaaaaaatttacaaatgacaggaaggtatctccgtgacgtctgg

SEQ ID NO: 1449 - DNA, 3459 bp, Artificial Sequence
  G8H-CPR engineered fusion
atggattttttgactattttcattggcccattattagcaataattgcactattttacgccaggttaaccattagcactcggggtaagaatttaccaccaggtcctactccactaccttttattggtaatttacatttgctaggtcatcacccacataagtctttggcgagacttgctaaaacttatggaccgttgatgctgctaagattagggtctgaaaatactgtagtagtgagttctgcagccgttgcaaaggaggtattacaaaagcatgatttagctttttcatctagatccataccagatgcggttcatgctcacgatcagttcaaatactctgtcgtctggttacctgtggcatctcggtggcgatcacttagaaaaactatgaattcgaatattttcagcggttcatgcttagatgctaatcaacatttgcgaagtagaaaagttgaagaattgatagcgtattgcaaagaaagttgccgtcgagctgaggctgtcgatgttggaagagctgcattcagaactgctttgaactccctgtccaacaccattttctcgagggatctggcagatcctctgtccgactctggaaaagaatttaaggatgttgtatcttccataatgatggaagcaggcaaacctaacagtgtagactattacccctttctatccagattcgatccccagggaataagaagacgtactgccatttattttgataaattaataaatattttcaaagggttgattgacgagagattggaaaaacgtaggagtcagtacgaggaagcgacagacgtcattgacatacttttgaacacaatcgaacaaaacccggaggaaatcgaccgtactcatattgaaaggatgtttttggacctatttcttgccggtacagatacgaccagtagtacggtcgagtgggccatggctgaggccatgaagaacccggaaactatgaaaaaagctaaagctgagctggcacaggtaattggcaaaggtaaaattgtacaagaaactgatatcccacatttgccatatttgcaatgtattgtgaaggaaactcttcgcttacatccgccggtcccatttcttatacctcgacgcgtacatgaagatgttgacatcttgggttatgttgttcctaataactcacaagtattcgtcaacatgtgggccattggccgcgatccagatatgtggaagaatccactacaatttgatcctgatagattccatgattcagaagtgggtctaagaggtaaagacttcgaacttataccatttggtgctgggcgtagaatctgcccaggattacctttagcaatgagaatggttccagttgttttgggctcactattgaattcatttgattggaaagtcgaaggcggcaaggaattggaaatgaacgaaaagtttggtatcacattggaaaaggcacaacccttgatggcggtaccaattgcactaggtggcggctctggcggaagcacatctagcggtagttccggtggttggagacggtcctccggatctggtaaaaaggttgttgaaccacctaaactaatcgtgccaaaaagtgttgtcgaaccagaggaaatcgatgaaggtaagaaaaagtttactatattttttggcacccagacaggtacggctgagggcttcgcaaaggcactagccgaggaagctaaagctaggtatgaaaaggcagtcattaaggttatcgatatagacgattatgcggctgatgacgaggaatatgaagaaaaatttaggaaggaaacgttagcttttttcattctggctacttacggcgatggtgaaccaacagacaatgcagccagattctacaagtggtttgttgaagggaatgacaggggtgattggttaaaaaatttgcaatacggtgtttttggcctcgggaatcgccagtacgaacatttcaataagatagccaaagtggtagatgagaaggttgcggaacaaggtggcaaacgtatcgtccccttagttttaggcgatgacgatcagtgtattgaagacgatttcgcggcatggcgtgaaaatgtttggcccgaacttgataatcttcttagagacgaagacgatactactgtttcaacaacctacacggccgcaatccccgaatacagagttgttttcccagataagtcagatagcttaatttcagaagcaaatggtcacgctaatggttatgctaatgggaatacggtctacgatgctcaacacccatgcagatctaatgttgcagtccgcaaggagttacacactccagcatcagatcgctcatgtactcatcttgatttcgatatcgctggcaccggattgagctacgggactggagatcatgtaggtgtctattgtgataatttatctgaaaccgtcgaggaagctgagaggttgcttaatctgccgcctgaaacgtattttagcctccacgctgataaggaagacggcacacctttggcaggatcttctttgcctcctccctttccaccttgtacattacggactgctttgactaggtatgcggatttgctgaacacccccaaaaagagcgctttgctggccttagctgcatatgcttccgatcctaatgaagccgatagactaaaatacctagccagtcccgctggcaaggacgagtacgcacaatctcttgtcgctaaccaaagatcgcttttagaggtaatggccgagtttccctctgcaaaaccaccacttggggtttttttcgcggctattgctcctcgtcttcaaccaaggttctattcaatttcctctagtccgcgtatggctcctagtagaatccatgttacatgtgcattagtctacgaaaagactccaggtggtagaattcataagggagtttgttctacttggatgaaaaatgctattccgctggaagaatcacgtgactgctcgtgggcccccatctttgtacgtcaaagtaattttaagcttcctgcagaccctaaggtgccagtgataatgataggtccaggtaccggcttggctcctttcagaggattcttacaggaaaggttagctttgaaggaagaaggcgcagaattgggtactgctgtgttcttctttggttgtcgtaacagaaaaatggactacatttacgaagatgagctaaaccatttcttagaaattggtgccttgtccgaactattagtcgccttcagcagggagggccctacgaagcaatacgttcagcataaaatggctgaaaaagcgtcagacatttggcgaatgataagtgatggtgcctatgtgtatgtgtgcggggatgcaaagggtatggctcgtgatgtccacagaacactacatactatcgcccaagagcaaggctcgatggattctacacaagctgaaggttttgtaaagaatctacaaatgacgggtaggtacctaagagatgtttgg

SEQ ID NO: 1450 - DNA, 3465 bp, Artificial Sequence
  G8H-CPR engineered fusion
atggacttcttttcgttcttgctgtattttttgtttactctgagtttagtacaagctactatttcactggttcgcggttctaagcataaaggacgaaaattgccaccgggtcctgcaccattgcctatagtaggtaacctactaaaactgggagatcaaccacacaagagtctggccgatttggctaaaatccatggtccaataatgaccctcaagcttggacatataaccactgtcataatttcctcttcagatttagctaaagaggtattgcaaaagcaggatcttgctttctcatcccgttctattccagacgccattagagcccataatcaatttcaatattcagttgtctggttgcctgtggcaaatcaatggaggtcgttgagaaagattcttaattctaatatttttagcgggaatcgtttggacgccaaccaacacttaaggtggagaaaggtgcaagaattgatcgcttacgtgcgcaaatcatctcaagttggcgacgctgtcgatattggtcgcgccgcattcagaacgtcattgaatttgttgtctaacacgatcttcagtgtcgatctggcggatcctaataacgactctgctaaagaatttaaagacttagtgtctaacatcatggttgaggctggtaagcctaaccttgtggattacttccctgttctggaaaagatagatcctcaaggcatcagaagaagaatgacaatccactttgggaaagtattagaaatgttcggaagattaatcaatgaaagattagaattccgtcgtctacgttcatccgtcatttctaacgacgtattggatgtcttactgaacactgaagagtctggtaacgagatcgatagaaaccatattgagcgtatgtgtcttgatttgttcgttgctggcactgacacaacaagctcgactttagaatgggctatggcggaagttttgcataaccccgaaacattggtcaaggctaaggctgagttagaacaaattattggtagaggtaaggcgatcgaagagagcgacatatctaacttgccataccttcgttcaattatcaaagaaactttgcgtttgcatccaccagtcccatttctgatacctagaaaagttgaagtggattccgaggtcagcggttatactgtgcctaagggttcccaggtattggtcaacgcttgggctataggtcgagatccctgctgttgggaaaatccattgaatttttccccagaaagatttttgaattcagagttagatgttagagggagagattttgaattgatcccattcggtgctggtcggaggatttgccctggtttaccattggccattagaatggtaccagtcatgctagggtcgttattgaactccttcgattggaagcttgatggtgggattaaaccagaagaactcgacatggaagagaaattcggcattactttgcagaaagctcaacccttacgggctgtccccacgttagtaggtggcggctctggcggaagcacatctagcggtagttccggtggttggaagaaaaccacagctgatcgctcaggcgagttaaaaccattaatgattcccaaatcactgatggcaaaggatgaagacgatgatttggacctagggtcaggtaagacaagggtgtccatcttctttggaactcaaacgggtactgctgaggggttcgcaaaggctctatcggaagaaataaaagctaggtacgaaaaagcagccgtcaaagacgattacgccgctgatgatgaccaatacgaagaaaaattgaaaaaagaaacattagccttcttctgcgtcgcaacttatggtgacggcgaaccaacagataatgcggctagattctacaaatggttcacggaagagaatgagagagatattaaattgcaacaactggcttacggtgtttttgcacttggaaacaggcagtacgaacattttaacaagattggaattgttttggatgaggagttgtgtaaaaagggagctaagagattgatagaagtgggcttgggagatgatgatcagtcaattgaggatgatttcaacgcatggaaggaaagcttgtggtctgagttggataagctccttaaggatgaagatgataaatcggtcgcgaccccttatactgctgtcataccggaatacagggtggtaactcatgaccctaggtttactacacagaagagtatggaatccaatgtggcgaatggtaacaccacaattgatatccatcatccatgtagagttgatgtggctgtccagaaagaattgcatacccatgaatcggacaggtcatgtattcatttggaattcgacatttcacgtacaggtattacttatgaaactggcgatcacgtgggcgtctacgctgagaatcacgtcgaaattgttgaggaagcaggaaaattgctgggacattcactagaccttgttttttcgatacatgcagataaggaagatggaagtccgttggaatctgcagtccctcctcctttcccaggaccatgtaccttgggtactggtttggccagatatgcagatctccttaatcctccccggaaaagcgcattggtggctttggctgcctatgcaactgaaccttcagaagctgaaaaacttaaacatctaacatccccagatggaaaggacgaatatagtcagtggatcgtggcgagtcaacgctcacttttagaagttatggcggcatttccaagcgctaaaccaccactgggtgttttctttgccgcaatagctcctagattacaacccagatattactctatctcatcctctccacgattagctccttctagagttcacgtcacttctgctttggtctacggtccaacgccaacaggtcgaattcataaaggtgtatgcagtacatggatgaagaatgctgttcctgctgagaaatcgcacgaatgttccggtgcccctatttttatcagagccagcaacttcaaattgccatctaatccgtctactcccattgttatggtaggtccgggtactggccttgccccgttcagaggttttttgcaagagcgaatggccttgaaggaagacggggaagagttaggttcttccctattatttttcggctgccggaatcgacaaatggactttatttatgaagatgaattgaacaactttgtggatcaaggagttatttccgaattgattatggcgttctctagagaaggtgcacaaaaagaatacgtccaacataaaatgatggaaaaggcagctcaagtatgggatctaattaaagaagaaggatatttatacgtatgtggggatgcaaaaggtatggccagagatgttcataggactttgcacactatcgtccaagaacaagaaggtgtctcatctagtgaagctgaagcgattgttaaaaaattacaaacagaaggcagatatttgagggatgtttgg

SEQ ID NO: 1451 - DNA, 3477 bp, Artificial Sequence
  G8H-CPR engineered fusion
atggacttcttttcgttcttgctgtattttttgtttactctgagtttagtacaagctactatttcactggttcgcggttctaagcataaaggacgaaaattgccaccgggtcctgcaccattgcctatagtaggtaacctactaaaactgggagatcaaccacacaagagtctggccgatttggctaaaatccatggtccaataatgaccctcaagcttggacatataaccactgtcataatttcctcttcagatttagctaaagaggtattgcaaaagcaggatcttgctttctcatcccgttctattccagacgccattagagcccataatcaatttcaatattcagttgtctggttgcctgtggcaaatcaatggaggtcgttgagaaagattcttaattctaatatttttagcgggaatcgtttggacgccaaccaacacttaaggtggagaaaggtgcaagaattgatcgcttacgtgcgcaaatcatctcaagttggcgacgctgtcgatattggtcgcgccgcattcagaacgtcattgaatttgttgtctaacacgatcttcagtgtcgatctggcggatcctaataacgactctgctaaagaatttaaagacttagtgtctaacatcatggttgaggctggtaagcctaaccttgtggattacttccctgttctggaaaagatagatcctcaaggcatcagaagaagaatgacaatccactttgggaaagtattagaaatgttcggaagattaatcaatgaaagattagaattccgtcgtctacgttcatccgtcatttctaacgacgtattggatgtcttactgaacactgaagagtctggtaacgagatcgatagaaaccatattgagcgtatgtgtcttgatttgttcgttgctggcactgacacaacaagctcgactttagaatgggctatggcggaagttttgcataaccccgaaacattggtcaaggctaaggctgagttagaacaaattattggtagaggtaaggcgatcgaagagagcgacatatctaacttgccataccttcgttcaattatcaaagaaactttgcgtttgcatccaccagtcccatttctgatacctagaaaagttgaagtggattccgaggtcagcggttatactgtgcctaagggttcccaggtattggtcaacgcttgggctataggtcgagatccctgctgttgggaaaatccattgaatttttccccagaaagatttttgaattcagagttagatgttagagggagagattttgaattgatcccattcggtgctggtcggaggatttgccctggtttaccattggccattagaatggtaccagtcatgctagggtcgttattgaactccttcgattggaagcttgatggtgggattaaaccagaagaactcgacatggaagagaaattcggcattactttgcagaaagctcaacccttacgggctgtccccacgttagtaggtggcggctctggcggaagcacatctagcggtagttccggtggttggagacgctcgtcagatagatctaaagaaagcaacccagttgttgtacctagacctttactggtagaagctgaagaagatgaggtggaagtcggttctggaaaaacaaaattgacaattttctacggtacacagaccggtactgcggaaggtttcgctaaggctctagcagaagagatcaaggctcgttacgaaaaagccgttgtaaaagtcgtcgacctagatgactatgccgacgatgacgaacaatatgaggaaaagttgaaaaaggaaacgctggctttctttatggttgctacttatggggacggtgaaccgacagacaatgccgctagattctataagtggtttaccgacggcaaagaaagaggtttgtggttacagcaattgaaatttggtgtgtttggtctaggtaatagacagtatgagcattttaataagatagggaaggttttagaccaggatttaagtgaacaagggggtaaacgattgattccagtaggactaggagatgatgaccagtgcattgaagacgattttgccgcctggcgggaacttttgtggcctgaattagatcagttgcttagggatggtgacgacactaacaccgtgagtaccccctatactgccgtcatccctgagtacagagtcgtcatatacgatccgacaactacctcattcgaagacaagcatctatcaatggcaaatgggaatgcctcttacgacatccaccacccatgtcgcgttaatgtagctgttcaaagagaactgcataagccagagtctgatcgatcatgtatccatttggaattcgatatatcctctacagggatcacatatgagaccggtgatcatgtaggcgtgtacgccgacaactgtgatgaaactgtagaagaagctgcccgattgttgggccagcctttggatctacttttttccattcattccgacgacgataacggtactcccctaggtggtagtctgccgccaccttttccaggcccttgtaccttaaggacagctttggctagatatgccgacttattgaatccaccacgaaaagctgcccttattgcccttgcagcccatgccattgaaccatcagaatcggaaaaattaaaattcttgagttcgccacaaggaaaagacgattactctcaatgggtcgttgggtctcaacgtagtctattggaagttatggctgaatttcccagcgcaaagccaccattgggtgttttcttcgccgcagttgctactagattacagccaagatattattcaattagcagttctcctagatttgcaccttctagagttcatgttacttgctctttagtttacggtcccacatcaaccggacgtattcacaaaggagtttgttcaacctggatgaagaatgctgtaccattagaaaagtcacgcaactgttcatgggccccaatttttattcgtgcttcaaacttcaaattacctagcaacccaagtattcctatagtgatggttggtccaggcactggcttagcacctttcagaggcttcttacaagagagattggccctgaaggaagacggtattcaattgggtccagccttgcttttttttggttgcagaaatagaaggatggattttatatatgaggacgagttaaataacttcgtggaccgcggtgttcttagtgacttaattgtcgcctttagtagagagggtccgcagaaagaatatgttcaacacaagatgatggaaaaagcggcttacatttggaatctaatttctcaggaaggctatctatatgtatgcggcgatgccaagggaatggctcgagatgttcatagaactcttcataccattgtccaagaacaagaaaatgctgatacttcaaaggccgaatcggttgtgaaaaaacttcaaatggacgggcgctatttgagagatgtgtgg

SEQ ID NO: 1452 - DNA, 3477 bp, Artificial Sequence
  G8H-CPR engineered fusion
atggacttcttttcgttcttgctgtattttttgtttactctgagtttagtacaagctactatttcactggttcgcggttctaagcataaaggacgaaaattgccaccgggtcctgcaccattgcctatagtaggtaacctactaaaactgggagatcaaccacacaagagtctggccgatttggctaaaatccatggtccaataatgaccctcaagcttggacatataaccactgtcataatttcctcttcagatttagctaaagaggtattgcaaaagcaggatcttgctttctcatcccgttctattccagacgccattagagcccataatcaatttcaatattcagttgtctggttgcctgtggcaaatcaatggaggtcgttgagaaagattcttaattctaatatttttagcgggaatcgtttggacgccaaccaacacttaaggtggagaaaggtgcaagaattgatcgcttacgtgcgcaaatcatctcaagttggcgacgctgtcgatattggtcgcgccgcattcagaacgtcattgaatttgttgtctaacacgatcttcagtgtcgatctggcggatcctaataacgactctgctaaagaatttaaagacttagtgtctaacatcatggttgaggctggtaagcctaaccttgtggattacttccctgttctggaaaagatagatcctcaaggcatcagaagaagaatgacaatccactttgggaaagtattagaaatgttcggaagattaatcaatgaaagattagaattccgtcgtctacgttcatccgtcatttctaacgacgtattggatgtcttactgaacactgaagagtctggtaacgagatcgatagaaaccatattgagcgtatgtgtcttgatttgttcgttgctggcactgacacaacaagctcgactttagaatgggctatggcggaagttttgcataaccccgaaacattggtcaaggctaaggctgagttagaacaaattattggtagaggtaaggcgatcgaagagagcgacatatctaacttgccataccttcgttcaattatcaaagaaactttgcgtttgcatccaccagtcccatttctgatacctagaaaagttgaagtggattccgaggtcagcggttatactgtgcctaagggttcccaggtattggtcaacgcttgggctataggtcgagatccctgctgttgggaaaatccattgaatttttccccagaaagatttttgaattcagagttagatgttagagggagagattttgaattgatcccattcggtgctggtcggaggatttgccctggtttaccattggccattagaatggtaccagtcatgctagggtcgttattgaactccttcgattggaagcttgatggtgggattaaaccagaagaactcgacatggaagagaaattcggcattactttgcagaaagctcaacccttacgggctgtccccacgttagtaggtggcggctctggcggaagcacatctagcggtagttccggtggttggcgaaagggtgccggttctgcaaagaaagttgtcgaacctccaaaactagttttaccaaaagctctctcagaaaccgaggaggtggacgacggaaaaaagaaggtcactattttttttggtacccaaactggtactgcagaaggttttgcgaaagctcttgcagaagaagccaaagcgagatatccacaagctaatttcaaagtcgtggatatggatgactatgcagcggaggacgaagagtacgaagagaaattgaccaaagagactatggctttttttttccttgcaacctacggtgatggtgagccaactgacaatgctgcacgcttttacaagtggttcgccgaaggtaaggaacgaggtgattcatttaaaaatttacattatggtgtgtttggtttgggaaatagacaatatgagcatttcaacaaaattgctatcgtagttgacaacattttggccgagcaaggcgggaaaagattggttcctgtaggtttaggggatgatgaccagtgtatcgaagacgatttcgcagcatggagagaaaatgtttggccggagcttgacaatttgttacgaaatgaggacgatgcaagtacagtatcgactccctatactgcagcggtgttggagtacagggtggagttccacgaccaaagtgacgagttatctttggagaactctctcgccaacggtcatgctaacggtaatgcctcatatgacgctcagcacccttgtagagcaaatgttgccgttaaaagagaattgcatacaccattatccgatagatcatgtacccaccttgaatttgacatatcaggcacaggcttacaatatgaaaccggtgatcatgtaggcgtttattgtgagaatctaattgagactgtcgaagaagctgaaagactgttgggtttgagcccacagacttattttagtgttcacaccgacaaagaagatggaactccccttggtggtagcgcacttcctccacctttcccaccctgtactttaaggacggccttatctcgatatgcggatttgttgaatgcccctaaaaagagtgcactgacagctcttgctgcttacgcgagtgaccctacggaagctgacagattaaaacacctagcttcacctgccggaaaggaagaatatgcccaatatgttgtggcttcccaaaggaccctactagaagtaatggccgatttcccatcggcaaagccacctctaggtgtgtttttcgcgggtgtcgccccaagattgcagcctagattttattccatttcttcttccccaaagattgctcccttcaggattcatgtaacctgcgctttggtgtatgacaaaactccaactggaagaatccataaaggtatctgttctacgtggataaagaatgctgtacctttggaggagagctcggattgttcgtcagctcctatctttgttcggaatagcaattttaaattaccatctgacgcaaacataccaattatcatgatcggtccaggcactgggctagcaccattcaggggttttttacaagaacgcctggctttaaaagagtccggtgcagaactgggcccagccattttgttctttggatgtcgtaacaggaaaatggacttcatatatgaagatgaactgaacgattttgtaaaggctggtgttgtgagtgagttgattgttgcctttagcagagaaggatcaactaaagaatacgttcaacacaagatggcacaacgtgcatctgacgtatggaaaatgatcagcgatggaggttacatttacgtctgcggcgacgcaaagggtatggctagagatgtacataggactttgcacaccatcgcccaagaacaaggctcaatgtcctcatccgaagccgagggtatggtaaaaaatttacaaatgacaggaaggtatctccgtgacgtctgg

SEQ ID NO: 1453 - DNA, 3477 bp, Artificial Sequence
  G8H-CPR engineered fusion
atggacttcttttcgttcttgctgtattttttgtttactctgagtttagtacaagctactatttcactggttcgcggttctaagcataaaggacgaaaattgccaccgggtcctgcaccattgcctatagtaggtaacctactaaaactgggagatcaaccacacaagagtctggccgatttggctaaaatccatggtccaataatgaccctcaagcttggacatataaccactgtcataatttcctcttcagatttagctaaagaggtattgcaaaagcaggatcttgctttctcatcccgttctattccagacgccattagagcccataatcaatttcaatattcagttgtctggttgcctgtggcaaatcaatggaggtcgttgagaaagattcttaattctaatatttttagcgggaatcgtttggacgccaaccaacacttaaggtggagaaaggtgcaagaattgatcgcttacgtgcgcaaatcatctcaagttggcgacgctgtcgatattggtcgcgccgcattcagaacgtcattgaatttgttgtctaacacgatcttcagtgtcgatctggcggatcctaataacgactctgctaaagaatttaaagacttagtgtctaacatcatggttgaggctggtaagcctaaccttgtggattacttccctgttctggaaaagatagatcctcaaggcatcagaagaagaatgacaatccactttgggaaagtattagaaatgttcggaagattaatcaatgaaagattagaattccgtcgtctacgttcatccgtcatttctaacgacgtattggatgtcttactgaacactgaagagtctggtaacgagatcgatagaaaccatattgagcgtatgtgtcttgatttgttcgttgctggcactgacacaacaagctcgactttagaatgggctatggcggaagttttgcataaccccgaaacattggtcaaggctaaggctgagttagaacaaattattggtagaggtaaggcgatcgaagagagcgacatatctaacttgccataccttcgttcaattatcaaagaaactttgcgtttgcatccaccagtcccatttctgatacctagaaaagttgaagtggattccgaggtcagcggttatactgtgcctaagggttcccaggtattggtcaacgcttgggctataggtcgagatccctgctgttgggaaaatccattgaatttttccccagaaagatttttgaattcagagttagatgttagagggagagattttgaattgatcccattcggtgctggtcggaggatttgccctggtttaccattggccattagaatggtaccagtcatgctagggtcgttattgaactccttcgattggaagcttgatggtgggattaaaccagaagaactcgacatggaagagaaattcggcattactttgcagaaagctcaacccttacgggctgtccccacgttagtaggtggcggctctggcggaagcacatctagcggtagttccggtggttggagacggtcctccggatctggtaaaaaggttgttgaaccacctaaactaatcgtgccaaaaagtgttgtcgaaccagaggaaatcgatgaaggtaagaaaaagtttactatattttttggcacccagacaggtacggctgagggcttcgcaaaggcactagccgaggaagctaaagctaggtatgaaaaggcagtcattaaggttatcgatatagacgattatgcggctgatgacgaggaatatgaagaaaaatttaggaaggaaacgttagcttttttcattctggctacttacggcgatggtgaaccaacagacaatgcagccagattctacaagtggtttgttgaagggaatgacaggggtgattggttaaaaaatttgcaatacggtgtttttggcctcgggaatcgccagtacgaacatttcaataagatagccaaagtggtagatgagaaggttgcggaacaaggtggcaaacgtatcgtccccttagttttaggcgatgacgatcagtgtattgaagacgatttcgcggcatggcgtgaaaatgtttggcccgaacttgataatcttcttagagacgaagacgatactactgtttcaacaacctacacggccgcaatccccgaatacagagttgttttcccagataagtcagatagcttaatttcagaagcaaatggtcacgctaatggttatgctaatgggaatacggtctacgatgctcaacacccatgcagatctaatgttgcagtccgcaaggagttacacactccagcatcagatcgctcatgtactcatcttgatttcgatatcgctggcaccggattgagctacgggactggagatcatgtaggtgtctattgtgataatttatctgaaaccgtcgaggaagctgagaggttgcttaatctgccgcctgaaacgtattttagcctccacgctgataaggaagacggcacacctttggcaggatcttctttgcctcctccctttccaccttgtacattacggactgctttgactaggtatgcggatttgctgaacacccccaaaaagagcgctttgctggccttagctgcatatgcttccgatcctaatgaagccgatagactaaaatacctagccagtcccgctggcaaggacgagtacgcacaatctcttgtcgctaaccaaagatcgcttttagaggtaatggccgagtttccctctgcaaaaccaccacttggggtttttttcgcggctattgctcctcgtcttcaaccaaggttctattcaatttcctctagtccgcgtatggctcctagtagaatccatgttacatgtgcattagtctacgaaaagactccaggtggtagaattcataagggagtttgttctacttggatgaaaaatgctattccgctggaagaatcacgtgactgctcgtgggcccccatctttgtacgtcaaagtaattttaagcttcctgcagaccctaaggtgccagtgataatgataggtccaggtaccggcttggctcctttcagaggattcttacaggaaaggttagctttgaaggaagaaggcgcagaattgggtactgctgtgttcttctttggttgtcgtaacagaaaaatggactacatttacgaagatgagctaaaccatttcttagaaattggtgccttgtccgaactattagtcgccttcagcagggagggccctacgaagcaatacgttcagcataaaatggctgaaaaagcgtcagacatttggcgaatgataagtgatggtgcctatgtgtatgtgtgcggggatgcaaagggtatggctcgtgatgtccacagaacactacatactatcgcccaagagcaaggctcgatggattctacacaagctgaaggttttgtaaagaatctacaaatgacgggtaggtacctaagagatgtttgg

SEQ ID NO: 1454 - DNA, 3450 bp, Artificial Sequence
  G8H-CPR engineered fusion
atggattacttaaccatcgccttaggtttgcttttcgctttgactttttaccagggattgacctatctgtccaggcgttcacaaaagcttcctccaggtccgcttccccttcctatcataggcaatttgcatcttcttggggatcacccacacaaatctctagccaagctgtctaaaaaatacggccctataatgtcgttaaaactgggacgtatcacgaccttagtcatttcttcttcgacgacggcaaaggaggtcctacaaaaacaagatttggcattttcttcaaggtccgtaccgaatgcattgcatgctcacaaccaattccaatactcggtagtgtggttgcctgttgctagtagatggcgttcattgcgaaagattttgaactccaacatcttctcgggaaatcggttagatgcgaaccagcatctaagatgccgtaaggtggaggaattaatagcatactgtaggaaaaactgtcaatccggtgaagcggttgatttaggtagggctgctttcagaacatctctcaacctactttcgaatacgatcttttcaaaggaccttaccgatccttactcggattcggcaaaggagttcaaggatctagtttggaacatcatggtcgaagctggtaagcctaaccttgtagacttttttcctgttttggagaaggtcgatccacaaggtattcgtagacgtatgaccgtacactttggtaaagtcatccagctttttaatggtttaattaacgaacgactggataaaagaaaatcaagggggggatacaatgacgtcctggacgtcttattaacaaccacagaagaaaatcctgaagaaattgacagaacccacatcgaaagaatgtgtttggatttatttgtagcgggaacagacactacaagtagcactttggaatgggccatggccgagatgttgcggaaccccgagaaaatgaaaaaaactcaagaagaactggctgaagtcgttggtcgagggaaattgattgaagaaggagatgtgtcaagattgccatatcttagatgtgtcgtgaaggaaactctgagagttcatccaccagtcccgttcttgattcctagaaaggtagttcaagatgtggaagtgtgcggctacaaagtacctaaaggttcacaagttttagtcaacgcgtgggctatagggagagacgaaacgttttggaaagatgctttaggttttaaaccagagagatttctagagagtgaattggatacccgtggaagagatttcgaattaattccttttggtgcaggtagacggatttgtcccggccttcctttggctaaccgaatggtcccagtaatgttaggatccttgttaaattcgtttaattggaagttagaaggcggcatagcgcctaaagatctcgatatggaggagaaatttggtatcacattacaaaaagcccatccccttagggcagtgccatctcctttaggtggcggctctggcggaagcacatctagcggtagttccggtggttggaagaaaaccacagctgatcgctcaggcgagttaaaaccattaatgattcccaaatcactgatggcaaaggatgaagacgatgatttggacctagggtcaggtaagacaagggtgtccatcttctttggaactcaaacgggtactgctgaggggttcgcaaaggctctatcggaagaaataaaagctaggtacgaaaaagcagccgtcaaagacgattacgccgctgatgatgaccaatacgaagaaaaattgaaaaaagaaacattagccttcttctgcgtcgcaacttatggtgacggcgaaccaacagataatgcggctagattctacaaatggttcacggaagagaatgagagagatattaaattgcaacaactggcttacggtgtttttgcacttggaaacaggcagtacgaacattttaacaagattggaattgttttggatgaggagttgtgtaaaaagggagctaagagattgatagaagtgggcttgggagatgatgatcagtcaattgaggatgatttcaacgcatggaaggaaagcttgtggtctgagttggataagctccttaaggatgaagatgataaatcggtcgcgaccccttatactgctgtcataccggaatacagggtggtaactcatgaccctaggtttactacacagaagagtatggaatccaatgtggcgaatggtaacaccacaattgatatccatcatccatgtagagttgatgtggctgtccagaaagaattgcatacccatgaatcggacaggtcatgtattcatttggaattcgacatttcacgtacaggtattacttatgaaactggcgatcacgtgggcgtctacgctgagaatcacgtcgaaattgttgaggaagcaggaaaattgctgggacattcactagaccttgttttttcgatacatgcagataaggaagatggaagtccgttggaatctgcagtccctcctcctttcccaggaccatgtaccttgggtactggtttggccagatatgcagatctccttaatcctccccggaaaagcgcattggtggctttggctgcctatgcaactgaaccttcagaagctgaaaaacttaaacatctaacatccccagatggaaaggacgaatatagtcagtggatcgtggcgagtcaacgctcacttttagaagttatggcggcatttccaagcgctaaaccaccactgggtgttttctttgccgcaatagctcctagattacaacccagatattactctatctcatcctctccacgattagctccttctagagttcacgtcacttctgctttggtctacggtccaacgccaacaggtcgaattcataaaggtgtatgcagtacatggatgaagaatgctgttcctgctgagaaatcgcacgaatgttccggtgcccctatttttatcagagccagcaacttcaaattgccatctaatccgtctactcccattgttatggtaggtccgggtactggccttgccccgttcagaggttttttgcaagagcgaatggccttgaaggaagacggggaagagttaggttcttccctattatttttcggctgccggaatcgacaaatggactttatttatgaagatgaattgaacaactttgtggatcaaggagttatttccgaattgattatggcgttctctagagaaggtgcacaaaaagaatacgtccaacataaaatgatggaaaaggcagctcaagtatgggatctaattaaagaagaaggatatttatacgtatgtggggatgcaaaaggtatggccagagatgttcataggactttgcacactatcgtccaagaacaagaaggtgtctcatctagtgaagctgaagcgattgttaaaaaattacaaacagaaggcagatatttgagggatgtttgg

SEQ ID NO: 1455 - DNA, 3462 bp, Artificial Sequence
  G8H-CPR engineered fusion
atggattacttaaccatcgccttaggtttgcttttcgctttgactttttaccagggattgacctatctgtccaggcgttcacaaaagcttcctccaggtccgcttccccttcctatcataggcaatttgcatcttcttggggatcacccacacaaatctctagccaagctgtctaaaaaatacggccctataatgtcgttaaaactgggacgtatcacgaccttagtcatttcttcttcgacgacggcaaaggaggtcctacaaaaacaagatttggcattttcttcaaggtccgtaccgaatgcattgcatgctcacaaccaattccaatactcggtagtgtggttgcctgttgctagtagatggcgttcattgcgaaagattttgaactccaacatcttctcgggaaatcggttagatgcgaaccagcatctaagatgccgtaaggtggaggaattaatagcatactgtaggaaaaactgtcaatccggtgaagcggttgatttaggtagggctgctttcagaacatctctcaacctactttcgaatacgatcttttcaaaggaccttaccgatccttactcggattcggcaaaggagttcaaggatctagtttggaacatcatggtcgaagctggtaagcctaaccttgtagacttttttcctgttttggagaaggtcgatccacaaggtattcgtagacgtatgaccgtacactttggtaaagtcatccagctttttaatggtttaattaacgaacgactggataaaagaaaatcaagggggggatacaatgacgtcctggacgtcttattaacaaccacagaagaaaatcctgaagaaattgacagaacccacatcgaaagaatgtgtttggatttatttgtagcgggaacagacactacaagtagcactttggaatgggccatggccgagatgttgcggaaccccgagaaaatgaaaaaaactcaagaagaactggctgaagtcgttggtcgagggaaattgattgaagaaggagatgtgtcaagattgccatatcttagatgtgtcgtgaaggaaactctgagagttcatccaccagtcccgttcttgattcctagaaaggtagttcaagatgtggaagtgtgcggctacaaagtacctaaaggttcacaagttttagtcaacgcgtgggctatagggagagacgaaacgttttggaaagatgctttaggttttaaaccagagagatttctagagagtgaattggatacccgtggaagagatttcgaattaattccttttggtgcaggtagacggatttgtcccggccttcctttggctaaccgaatggtcccagtaatgttaggatccttgttaaattcgtttaattggaagttagaaggcggcatagcgcctaaagatctcgatatggaggagaaatttggtatcacattacaaaaagcccatccccttagggcagtgccatctcctttaggtggcggctctggcggaagcacatctagcggtagttccggtggttggagacgctcgtcagatagatctaaagaaagcaacccagttgttgtacctagacctttactggtagaagctgaagaagatgaggtggaagtcggttctggaaaaacaaaattgacaattttctacggtacacagaccggtactgcggaaggtttcgctaaggctctagcagaagagatcaaggctcgttacgaaaaagccgttgtaaaagtcgtcgacctagatgactatgccgacgatgacgaacaatatgaggaaaagttgaaaaaggaaacgctggctttctttatggttgctacttatggggacggtgaaccgacagacaatgccgctagattctataagtggtttaccgacggcaaagaaagaggtttgtggttacagcaattgaaatttggtgtgtttggtctaggtaatagacagtatgagcattttaataagatagggaaggttttagaccaggatttaagtgaacaagggggtaaacgattgattccagtaggactaggagatgatgaccagtgcattgaagacgattttgccgcctggcgggaacttttgtggcctgaattagatcagttgcttagggatggtgacgacactaacaccgtgagtaccccctatactgccgtcatccctgagtacagagtcgtcatatacgatccgacaactacctcattcgaagacaagcatctatcaatggcaaatgggaatgcctcttacgacatccaccacccatgtcgcgttaatgtagctgttcaaagagaactgcataagccagagtctgatcgatcatgtatccatttggaattcgatatatcctctacagggatcacatatgagaccggtgatcatgtaggcgtgtacgccgacaactgtgatgaaactgtagaagaagctgcccgattgttgggccagcctttggatctacttttttccattcattccgacgacgataacggtactcccctaggtggtagtctgccgccaccttttccaggcccttgtaccttaaggacagctttggctagatatgccgacttattgaatccaccacgaaaagctgcccttattgcccttgcagcccatgccattgaaccatcagaatcggaaaaattaaaattcttgagttcgccacaaggaaaagacgattactctcaatgggtcgttgggtctcaacgtagtctattggaagttatggctgaatttcccagcgcaaagccaccattgggtgttttcttcgccgcagttgctactagattacagccaagatattattcaattagcagttctcctagatttgcaccttctagagttcatgttacttgctctttagtttacggtcccacatcaaccggacgtattcacaaaggagtttgttcaacctggatgaagaatgctgtaccattagaaaagtcacgcaactgttcatgggccccaatttttattcgtgcttcaaacttcaaattacctagcaacccaagtattcctatagtgatggttggtccaggcactggcttagcacctttcagaggcttcttacaagagagattggccctgaaggaagacggtattcaattgggtccagccttgcttttttttggttgcagaaatagaaggatggattttatatatgaggacgagttaaataacttcgtggaccgcggtgttcttagtgacttaattgtcgcctttagtagagagggtccgcagaaagaatatgttcaacacaagatgatggaaaaagcggcttacatttggaatctaatttctcaggaaggctatctatatgtatgcggcgatgccaagggaatggctcgagatgttcatagaactcttcataccattgtccaagaacaagaaaatgctgatacttcaaaggccgaatcggttgtgaaaaaacttcaaatggacgggcgctatttgagagatgtgtgg

SEQ ID NO: 1456 - DNA, 3462 bp, Artificial Sequence
  G8H-CPR engineered fusion
atggattacttaaccatcgccttaggtttgcttttcgctttgactttttaccagggattgacctatctgtccaggcgttcacaaaagcttcctccaggtccgcttccccttcctatcataggcaatttgcatcttcttggggatcacccacacaaatctctagccaagctgtctaaaaaatacggccctataatgtcgttaaaactgggacgtatcacgaccttagtcatttcttcttcgacgacggcaaaggaggtcctacaaaaacaagatttggcattttcttcaaggtccgtaccgaatgcattgcatgctcacaaccaattccaatactcggtagtgtggttgcctgttgctagtagatggcgttcattgcgaaagattttgaactccaacatcttctcgggaaatcggttagatgcgaaccagcatctaagatgccgtaaggtggaggaattaatagcatactgtaggaaaaactgtcaatccggtgaagcggttgatttaggtagggctgctttcagaacatctctcaacctactttcgaatacgatcttttcaaaggaccttaccgatccttactcggattcggcaaaggagttcaaggatctagtttggaacatcatggtcgaagctggtaagcctaaccttgtagacttttttcctgttttggagaaggtcgatccacaaggtattcgtagacgtatgaccgtacactttggtaaagtcatccagctttttaatggtttaattaacgaacgactggataaaagaaaatcaagggggggatacaatgacgtcctggacgtcttattaacaaccacagaagaaaatcctgaagaaattgacagaacccacatcgaaagaatgtgtttggatttatttgtagcgggaacagacactacaagtagcactttggaatgggccatggccgagatgttgcggaaccccgagaaaatgaaaaaaactcaagaagaactggctgaagtcgttggtcgagggaaattgattgaagaaggagatgtgtcaagattgccatatcttagatgtgtcgtgaaggaaactctgagagttcatccaccagtcccgttcttgattcctagaaaggtagttcaagatgtggaagtgtgcggctacaaagtacctaaaggttcacaagttttagtcaacgcgtgggctatagggagagacgaaacgttttggaaagatgctttaggttttaaaccagagagatttctagagagtgaattggatacccgtggaagagatttcgaattaattccttttggtgcaggtagacggatttgtcccggccttcctttggctaaccgaatggtcccagtaatgttaggatccttgttaaattcgtttaattggaagttagaaggcggcatagcgcctaaagatctcgatatggaggagaaatttggtatcacattacaaaaagcccatccccttagggcagtgccatctcctttaggtggcggctctggcggaagcacatctagcggtagttccggtggttggcgaaagggtgccggttctgcaaagaaagttgtcgaacctccaaaactagttttaccaaaagctctctcagaaaccgaggaggtggacgacggaaaaaagaaggtcactattttttttggtacccaaactggtactgcagaaggttttgcgaaagctcttgcagaagaagccaaagcgagatatccacaagctaatttcaaagtcgtggatatggatgactatgcagcggaggacgaagagtacgaagagaaattgaccaaagagactatggctttttttttccttgcaacctacggtgatggtgagccaactgacaatgctgcacgcttttacaagtggttcgccgaaggtaaggaacgaggtgattcatttaaaaatttacattatggtgtgtttggtttgggaaatagacaatatgagcatttcaacaaaattgctatcgtagttgacaacattttggccgagcaaggcgggaaaagattggttcctgtaggtttaggggatgatgaccagtgtatcgaagacgatttcgcagcatggagagaaaatgtttggccggagcttgacaatttgttacgaaatgaggacgatgcaagtacagtatcgactccctatactgcagcggtgttggagtacagggtggagttccacgaccaaagtgacgagttatctttggagaactctctcgccaacggtcatgctaacggtaatgcctcatatgacgctcagcacccttgtagagcaaatgttgccgttaaaagagaattgcatacaccattatccgatagatcatgtacccaccttgaatttgacatatcaggcacaggcttacaatatgaaaccggtgatcatgtaggcgtttattgtgagaatctaattgagactgtcgaagaagctgaaagactgttgggtttgagcccacagacttattttagtgttcacaccgacaaagaagatggaactccccttggtggtagcgcacttcctccacctttcccaccctgtactttaaggacggccttatctcgatatgcggatttgttgaatgcccctaaaaagagtgcactgacagctcttgctgcttacgcgagtgaccctacggaagctgacagattaaaacacctagcttcacctgccggaaaggaagaatatgcccaatatgttgtggcttcccaaaggaccctactagaagtaatggccgatttcccatcggcaaagccacctctaggtgtgtttttcgcgggtgtcgccccaagattgcagcctagattttattccatttcttcttccccaaagattgctcccttcaggattcatgtaacctgcgctttggtgtatgacaaaactccaactggaagaatccataaaggtatctgttctacgtggataaagaatgctgtacctttggaggagagctcggattgttcgtcagctcctatctttgttcggaatagcaattttaaattaccatctgacgcaaacataccaattatcatgatcggtccaggcactgggctagcaccattcaggggttttttacaagaacgcctggctttaaaagagtccggtgcagaactgggcccagccattttgttctttggatgtcgtaacaggaaaatggacttcatatatgaagatgaactgaacgattttgtaaaggctggtgttgtgagtgagttgattgttgcctttagcagagaaggatcaactaaagaatacgttcaacacaagatggcacaacgtgcatctgacgtatggaaaatgatcagcgatggaggttacatttacgtctgcggcgacgcaaagggtatggctagagatgtacataggactttgcacaccatcgcccaagaacaaggctcaatgtcctcatccgaagccgagggtatggtaaaaaatttacaaatgacaggaaggtatctccgtgacgtctgg

SEQ ID NO: 1457 - DNA, 3462 bp, Artificial Sequence
  G8H-CPR engineered fusion
atggattacttaaccatcgccttaggtttgcttttcgctttgactttttaccagggattgacctatctgtccaggcgttcacaaaagcttcctccaggtccgcttccccttcctatcataggcaatttgcatcttcttggggatcacccacacaaatctctagccaagctgtctaaaaaatacggccctataatgtcgttaaaactgggacgtatcacgaccttagtcatttcttcttcgacgacggcaaaggaggtcctacaaaaacaagatttggcattttcttcaaggtccgtaccgaatgcattgcatgctcacaaccaattccaatactcggtagtgtggttgcctgttgctagtagatggcgttcattgcgaaagattttgaactccaacatcttctcgggaaatcggttagatgcgaaccagcatctaagatgccgtaaggtggaggaattaatagcatactgtaggaaaaactgtcaatccggtgaagcggttgatttaggtagggctgctttcagaacatctctcaacctactttcgaatacgatcttttcaaaggaccttaccgatccttactcggattcggcaaaggagttcaaggatctagtttggaacatcatggtcgaagctggtaagcctaaccttgtagacttttttcctgttttggagaaggtcgatccacaaggtattcgtagacgtatgaccgtacactttggtaaagtcatccagctttttaatggtttaattaacgaacgactggataaaagaaaatcaagggggggatacaatgacgtcctggacgtcttattaacaaccacagaagaaaatcctgaagaaattgacagaacccacatcgaaagaatgtgtttggatttatttgtagcgggaacagacactacaagtagcactttggaatgggccatggccgagatgttgcggaaccccgagaaaatgaaaaaaactcaagaagaactggctgaagtcgttggtcgagggaaattgattgaagaaggagatgtgtcaagattgccatatcttagatgtgtcgtgaaggaaactctgagagttcatccaccagtcccgttcttgattcctagaaaggtagttcaagatgtggaagtgtgcggctacaaagtacctaaaggttcacaagttttagtcaacgcgtgggctatagggagagacgaaacgttttggaaagatgctttaggttttaaaccagagagatttctagagagtgaattggatacccgtggaagagatttcgaattaattccttttggtgcaggtagacggatttgtcccggccttcctttggctaaccgaatggtcccagtaatgttaggatccttgttaaattcgtttaattggaagttagaaggcggcatagcgcctaaagatctcgatatggaggagaaatttggtatcacattacaaaaagcccatccccttagggcagtgccatctcctttaggtggcggctctggcggaagcacatctagcggtagttccggtggttggagacggtcctccggatctggtaaaaaggttgttgaaccacctaaactaatcgtgccaaaaagtgttgtcgaaccagaggaaatcgatgaaggtaagaaaaagtttactatattttttggcacccagacaggtacggctgagggcttcgcaaaggcactagccgaggaagctaaagctaggtatgaaaaggcagtcattaaggttatcgatatagacgattatgcggctgatgacgaggaatatgaagaaaaatttaggaaggaaacgttagcttttttcattctggctacttacggcgatggtgaaccaacagacaatgcagccagattctacaagtggtttgttgaagggaatgacaggggtgattggttaaaaaatttgcaatacggtgtttttggcctcgggaatcgccagtacgaacatttcaataagatagccaaagtggtagatgagaaggttgcggaacaaggtggcaaacgtatcgtccccttagttttaggcgatgacgatcagtgtattgaagacgatttcgcggcatggcgtgaaaatgtttggcccgaacttgataatcttcttagagacgaagacgatactactgtttcaacaacctacacggccgcaatccccgaatacagagttgttttcccagataagtcagatagcttaatttcagaagcaaatggtcacgctaatggttatgctaatgggaatacggtctacgatgctcaacacccatgcagatctaatgttgcagtccgcaaggagttacacactccagcatcagatcgctcatgtactcatcttgatttcgatatcgctggcaccggattgagctacgggactggagatcatgtaggtgtctattgtgataatttatctgaaaccgtcgaggaagctgagaggttgcttaatctgccgcctgaaacgtattttagcctccacgctgataaggaagacggcacacctttggcaggatcttctttgcctcctccctttccaccttgtacattacggactgctttgactaggtatgcggatttgctgaacacccccaaaaagagcgctttgctggccttagctgcatatgcttccgatcctaatgaagccgatagactaaaatacctagccagtcccgctggcaaggacgagtacgcacaatctcttgtcgctaaccaaagatcgcttttagaggtaatggccgagtttccctctgcaaaaccaccacttggggtttttttcgcggctattgctcctcgtcttcaaccaaggttctattcaatttcctctagtccgcgtatggctcctagtagaatccatgttacatgtgcattagtctacgaaaagactccaggtggtagaattcataagggagtttgttctacttggatgaaaaatgctattccgctggaagaatcacgtgactgctcgtgggcccccatctttgtacgtcaaagtaattttaagcttcctgcagaccctaaggtgccagtgataatgataggtccaggtaccggcttggctcctttcagaggattcttacaggaaaggttagctttgaaggaagaaggcgcagaattgggtactgctgtgttcttctttggttgtcgtaacagaaaaatggactacatttacgaagatgagctaaaccatttcttagaaattggtgccttgtccgaactattagtcgccttcagcagggagggccctacgaagcaatacgttcagcataaaatggctgaaaaagcgtcagacatttggcgaatgataagtgatggtgcctatgtgtatgtgtgcggggatgcaaagggtatggctcgtgatgtccacagaacactacatactatcgcccaagagcaaggctcgatggattctacacaagctgaaggttttgtaaagaatctacaaatgacgggtaggtacctaagagatgtttgg

SEQ ID NO: 1458 - DNA, 3465 bp, Artificial Sequence
  G8H-CPR engineered fusion
atggatttctttacaatcgcattgtcgttgttattcgcttttacgttatttaaagcaattatctcgctgacaaaatcgggtaaaaataaaaatcttcctcctggcccagcacccttacccatcatcggttctctgcataaattaggcgatcaaccccaccaaagcttggctaaattggctaagatatacggacctattatgagtctaaagttaggccggattaccactgtcgtgatttctagcagtgatgcagctaaagaagttctacaaaaaaaagatttagctttctcgtcgagacatgtcccagacgcattacatgctcacaatcaattcaaattttcagttgtctggttaccagtagcacctcaatggagatccttaaggaaaatcttgaactctaatatttttagcggtaaccggctagacgcaaatcaacaccttcgatgccggaaagtcgaagaactaatcacatactgcagaaaatcttcccattcaggagacgccgttgatataggtagagctgcttttcgtacaagtctaaatctattgtcaaatactattttcagtaaggatttaactgacccataccaagattctgccaaggagtttaaagaactagtaggtaacatcatggtagaagctggtaaacctaatttagttgatttttttccctctctaaaaaaaattgatcctcaagggatccgacatagaatgactattcattttggaaaggtcctggaactctttggaggactaattaatgaaagactagaattaaaatcatctcaaaaaagtgatgaaaaaaatgatgttctagacgtttgcttaagcattagcaaagagaaccctgatgagatcgacagaacacacatagaaaggatgtgtctcgacctgttcgttgccggtacggatactacatcatctacgttggaatgggctatggctgaagtcctaagaaatccagaaaccttggttaaagctaaagcggaattggaagaagttatcggcaagggtaagatcttggccgaagcagatgtatcgaacttgccatatctgaggtgtattgttaaggaaactcttagaatccatccgccagtaccattcctaattcctagaaaggtggaaatggatgtagaagcgtgtggttacactgtgcctaaaaatagtcaggtttttgttaatgtttgggcgataggaagagatcctactttatgggaagatcccctgagttttaaacctgaaagatttatggcatcggaattggacgtaaggggtcgtgacttcgagcttcttcctttcggagctggcaggagaatttgcccaggtctgccattggctatccgtatggttcccgtcatgctgggttctttagttaatagctttaactggaagttggatggtggtattgcccctaaggagttagatatgggtgagaaatttggtatcactttggcaaaagcacaaagtctcagagcagtcccatcaccactggtgggtggcggctctggcggaagcacatctagcggtagttccggtggttggaagaaaaccacagctgatcgctcaggcgagttaaaaccattaatgattcccaaatcactgatggcaaaggatgaagacgatgatttggacctagggtcaggtaagacaagggtgtccatcttctttggaactcaaacgggtactgctgaggggttcgcaaaggctctatcggaagaaataaaagctaggtacgaaaaagcagccgtcaaagacgattacgccgctgatgatgaccaatacgaagaaaaattgaaaaaagaaacattagccttcttctgcgtcgcaacttatggtgacggcgaaccaacagataatgcggctagattctacaaatggttcacggaagagaatgagagagatattaaattgcaacaactggcttacggtgtttttgcacttggaaacaggcagtacgaacattttaacaagattggaattgttttggatgaggagttgtgtaaaaagggagctaagagattgatagaagtgggcttgggagatgatgatcagtcaattgaggatgatttcaacgcatggaaggaaagcttgtggtctgagttggataagctccttaaggatgaagatgataaatcggtcgcgaccccttatactgctgtcataccggaatacagggtggtaactcatgaccctaggtttactacacagaagagtatggaatccaatgtggcgaatggtaacaccacaattgatatccatcatccatgtagagttgatgtggctgtccagaaagaattgcatacccatgaatcggacaggtcatgtattcatttggaattcgacatttcacgtacaggtattacttatgaaactggcgatcacgtgggcgtctacgctgagaatcacgtcgaaattgttgaggaagcaggaaaattgctgggacattcactagaccttgttttttcgatacatgcagataaggaagatggaagtccgttggaatctgcagtccctcctcctttcccaggaccatgtaccttgggtactggtttggccagatatgcagatctccttaatcctccccggaaaagcgcattggtggctttggctgcctatgcaactgaaccttcagaagctgaaaaacttaaacatctaacatccccagatggaaaggacgaatatagtcagtggatcgtggcgagtcaacgctcacttttagaagttatggcggcatttccaagcgctaaaccaccactgggtgttttctttgccgcaatagctcctagattacaacccagatattactctatctcatcctctccacgattagctccttctagagttcacgtcacttctgctttggtctacggtccaacgccaacaggtcgaattcataaaggtgtatgcagtacatggatgaagaatgctgttcctgctgagaaatcgcacgaatgttccggtgcccctatttttatcagagccagcaacttcaaattgccatctaatccgtctactcccattgttatggtaggtccgggtactggccttgccccgttcagaggttttttgcaagagcgaatggccttgaaggaagacggggaagagttaggttcttccctattatttttcggctgccggaatcgacaaatggactttatttatgaagatgaattgaacaactttgtggatcaaggagttatttccgaattgattatggcgttctctagagaaggtgcacaaaaagaatacgtccaacataaaatgatggaaaaggcagctcaagtatgggatctaattaaagaagaaggatatttatacgtatgtggggatgcaaaaggtatggccagagatgttcataggactttgcacactatcgtccaagaacaagaaggtgtctcatctagtgaagctgaagcgattgttaaaaaattacaaacagaaggcagatatttgagggatgtttgg

SEQ ID NO: 1459 - DNA, 3477 bp, Artificial Sequence
  G8H-CPR engineered fusion
atggatttctttacaatcgcattgtcgttgttattcgcttttacgttatttaaagcaattatctcgctgacaaaatcgggtaaaaataaaaatcttcctcctggcccagcacccttacccatcatcggttctctgcataaattaggcgatcaaccccaccaaagcttggctaaattggctaagatatacggacctattatgagtctaaagttaggccggattaccactgtcgtgatttctagcagtgatgcagctaaagaagttctacaaaaaaaagatttagctttctcgtcgagacatgtcccagacgcattacatgctcacaatcaattcaaattttcagttgtctggttaccagtagcacctcaatggagatccttaaggaaaatcttgaactctaatatttttagcggtaaccggctagacgcaaatcaacaccttcgatgccggaaagtcgaagaactaatcacatactgcagaaaatcttcccattcaggagacgccgttgatataggtagagctgcttttcgtacaagtctaaatctattgtcaaatactattttcagtaaggatttaactgacccataccaagattctgccaaggagtttaaagaactagtaggtaacatcatggtagaagctggtaaacctaatttagttgatttttttccctctctaaaaaaaattgatcctcaagggatccgacatagaatgactattcattttggaaaggtcctggaactctttggaggactaattaatgaaagactagaattaaaatcatctcaaaaaagtgatgaaaaaaatgatgttctagacgtttgcttaagcattagcaaagagaaccctgatgagatcgacagaacacacatagaaaggatgtgtctcgacctgttcgttgccggtacggatactacatcatctacgttggaatgggctatggctgaagtcctaagaaatccagaaaccttggttaaagctaaagcggaattggaagaagttatcggcaagggtaagatcttggccgaagcagatgtatcgaacttgccatatctgaggtgtattgttaaggaaactcttagaatccatccgccagtaccattcctaattcctagaaaggtggaaatggatgtagaagcgtgtggttacactgtgcctaaaaatagtcaggtttttgttaatgtttgggcgataggaagagatcctactttatgggaagatcccctgagttttaaacctgaaagatttatggcatcggaattggacgtaaggggtcgtgacttcgagcttcttcctttcggagctggcaggagaatttgcccaggtctgccattggctatccgtatggttcccgtcatgctgggttctttagttaatagctttaactggaagttggatggtggtattgcccctaaggagttagatatgggtgagaaatttggtatcactttggcaaaagcacaaagtctcagagcagtcccatcaccactggtgggtggcggctctggcggaagcacatctagcggtagttccggtggttggagacgctcgtcagatagatctaaagaaagcaacccagttgttgtacctagacctttactggtagaagctgaagaagatgaggtggaagtcggttctggaaaaacaaaattgacaattttctacggtacacagaccggtactgcggaaggtttcgctaaggctctagcagaagagatcaaggctcgttacgaaaaagccgttgtaaaagtcgtcgacctagatgactatgccgacgatgacgaacaatatgaggaaaagttgaaaaaggaaacgctggctttctttatggttgctacttatggggacggtgaaccgacagacaatgccgctagattctataagtggtttaccgacggcaaagaaagaggtttgtggttacagcaattgaaatttggtgtgtttggtctaggtaatagacagtatgagcattttaataagatagggaaggttttagaccaggatttaagtgaacaagggggtaaacgattgattccagtaggactaggagatgatgaccagtgcattgaagacgattttgccgcctggcgggaacttttgtggcctgaattagatcagttgcttagggatggtgacgacactaacaccgtgagtaccccctatactgccgtcatccctgagtacagagtcgtcatatacgatccgacaactacctcattcgaagacaagcatctatcaatggcaaatgggaatgcctcttacgacatccaccacccatgtcgcgttaatgtagctgttcaaagagaactgcataagccagagtctgatcgatcatgtatccatttggaattcgatatatcctctacagggatcacatatgagaccggtgatcatgtaggcgtgtacgccgacaactgtgatgaaactgtagaagaagctgcccgattgttgggccagcctttggatctacttttttccattcattccgacgacgataacggtactcccctaggtggtagtctgccgccaccttttccaggcccttgtaccttaaggacagctttggctagatatgccgacttattgaatccaccacgaaaagctgcccttattgcccttgcagcccatgccattgaaccatcagaatcggaaaaattaaaattcttgagttcgccacaaggaaaagacgattactctcaatgggtcgttgggtctcaacgtagtctattggaagttatggctgaatttcccagcgcaaagccaccattgggtgttttcttcgccgcagttgctactagattacagccaagatattattcaattagcagttctcctagatttgcaccttctagagttcatgttacttgctctttagtttacggtcccacatcaaccggacgtattcacaaaggagtttgttcaacctggatgaagaatgctgtaccattagaaaagtcacgcaactgttcatgggccccaatttttattcgtgcttcaaacttcaaattacctagcaacccaagtattcctatagtgatggttggtccaggcactggcttagcacctttcagaggcttcttacaagagagattggccctgaaggaagacggtattcaattgggtccagccttgcttttttttggttgcagaaatagaaggatggattttatatatgaggacgagttaaataacttcgtggaccgcggtgttcttagtgacttaattgtcgcctttagtagagagggtccgcagaaagaatatgttcaacacaagatgatggaaaaagcggcttacatttggaatctaatttctcaggaaggctatctatatgtatgcggcgatgccaagggaatggctcgagatgttcatagaactcttcataccattgtccaagaacaagaaaatgctgatacttcaaaggccgaatcggttgtgaaaaaacttcaaatggacgggcgctatttgagagatgtgtgg

SEQ ID NO: 1460 - DNA, 3477 bp, Artificial Sequence
  G8H-CPR engineered fusion
atggatttctttacaatcgcattgtcgttgttattcgcttttacgttatttaaagcaattatctcgctgacaaaatcgggtaaaaataaaaatcttcctcctggcccagcacccttacccatcatcggttctctgcataaattaggcgatcaaccccaccaaagcttggctaaattggctaagatatacggacctattatgagtctaaagttaggccggattaccactgtcgtgatttctagcagtgatgcagctaaagaagttctacaaaaaaaagatttagctttctcgtcgagacatgtcccagacgcattacatgctcacaatcaattcaaattttcagttgtctggttaccagtagcacctcaatggagatccttaaggaaaatcttgaactctaatatttttagcggtaaccggctagacgcaaatcaacaccttcgatgccggaaagtcgaagaactaatcacatactgcagaaaatcttcccattcaggagacgccgttgatataggtagagctgcttttcgtacaagtctaaatctattgtcaaatactattttcagtaaggatttaactgacccataccaagattctgccaaggagtttaaagaactagtaggtaacatcatggtagaagctggtaaacctaatttagttgatttttttccctctctaaaaaaaattgatcctcaagggatccgacatagaatgactattcattttggaaaggtcctggaactctttggaggactaattaatgaaagactagaattaaaatcatctcaaaaaagtgatgaaaaaaatgatgttctagacgtttgcttaagcattagcaaagagaaccctgatgagatcgacagaacacacatagaaaggatgtgtctcgacctgttcgttgccggtacggatactacatcatctacgttggaatgggctatggctgaagtcctaagaaatccagaaaccttggttaaagctaaagcggaattggaagaagttatcggcaagggtaagatcttggccgaagcagatgtatcgaacttgccatatctgaggtgtattgttaaggaaactcttagaatccatccgccagtaccattcctaattcctagaaaggtggaaatggatgtagaagcgtgtggttacactgtgcctaaaaatagtcaggtttttgttaatgtttgggcgataggaagagatcctactttatgggaagatcccctgagttttaaacctgaaagatttatggcatcggaattggacgtaaggggtcgtgacttcgagcttcttcctttcggagctggcaggagaatttgcccaggtctgccattggctatccgtatggttcccgtcatgctgggttctttagttaatagctttaactggaagttggatggtggtattgcccctaaggagttagatatgggtgagaaatttggtatcactttggcaaaagcacaaagtctcagagcagtcccatcaccactggtgggtggcggctctggcggaagcacatctagcggtagttccggtggttggcgaaagggtgccggttctgcaaagaaagttgtcgaacctccaaaactagttttaccaaaagctctctcagaaaccgaggaggtggacgacggaaaaaagaaggtcactattttttttggtacccaaactggtactgcagaaggttttgcgaaagctcttgcagaagaagccaaagcgagatatccacaagctaatttcaaagtcgtggatatggatgactatgcagcggaggacgaagagtacgaagagaaattgaccaaagagactatggctttttttttccttgcaacctacggtgatggtgagccaactgacaatgctgcacgcttttacaagtggttcgccgaaggtaaggaacgaggtgattcatttaaaaatttacattatggtgtgtttggtttgggaaatagacaatatgagcatttcaacaaaattgctatcgtagttgacaacattttggccgagcaaggcgggaaaagattggttcctgtaggtttaggggatgatgaccagtgtatcgaagacgatttcgcagcatggagagaaaatgtttggccggagcttgacaatttgttacgaaatgaggacgatgcaagtacagtatcgactccctatactgcagcggtgttggagtacagggtggagttccacgaccaaagtgacgagttatctttggagaactctctcgccaacggtcatgctaacggtaatgcctcatatgacgctcagcacccttgtagagcaaatgttgccgttaaaagagaattgcatacaccattatccgatagatcatgtacccaccttgaatttgacatatcaggcacaggcttacaatatgaaaccggtgatcatgtaggcgtttattgtgagaatctaattgagactgtcgaagaagctgaaagactgttgggtttgagcccacagacttattttagtgttcacaccgacaaagaagatggaactccccttggtggtagcgcacttcctccacctttcccaccctgtactttaaggacggccttatctcgatatgcggatttgttgaatgcccctaaaaagagtgcactgacagctcttgctgcttacgcgagtgaccctacggaagctgacagattaaaacacctagcttcacctgccggaaaggaagaatatgcccaatatgttgtggcttcccaaaggaccctactagaagtaatggccgatttcccatcggcaaagccacctctaggtgtgtttttcgcgggtgtcgccccaagattgcagcctagattttattccatttcttcttccccaaagattgctcccttcaggattcatgtaacctgcgctttggtgtatgacaaaactccaactggaagaatccataaaggtatctgttctacgtggataaagaatgctgtacctttggaggagagctcggattgttcgtcagctcctatctttgttcggaatagcaattttaaattaccatctgacgcaaacataccaattatcatgatcggtccaggcactgggctagcaccattcaggggttttttacaagaacgcctggctttaaaagagtccggtgcagaactgggcccagccattttgttctttggatgtcgtaacaggaaaatggacttcatatatgaagatgaactgaacgattttgtaaaggctggtgttgtgagtgagttgattgttgcctttagcagagaaggatcaactaaagaatacgttcaacacaagatggcacaacgtgcatctgacgtatggaaaatgatcagcgatggaggttacatttacgtctgcggcgacgcaaagggtatggctagagatgtacataggactttgcacaccatcgcccaagaacaaggctcaatgtcctcatccgaagccgagggtatggtaaaaaatttacaaatgacaggaaggtatctccgtgacgtctgg

SEQ ID NO: 1461 - DNA, 3477 bp, Artificial Sequence
  G8H-CPR engineered fusion
atggatttctttacaatcgcattgtcgttgttattcgcttttacgttatttaaagcaattatctcgctgacaaaatcgggtaaaaataaaaatcttcctcctggcccagcacccttacccatcatcggttctctgcataaattaggcgatcaaccccaccaaagcttggctaaattggctaagatatacggacctattatgagtctaaagttaggccggattaccactgtcgtgatttctagcagtgatgcagctaaagaagttctacaaaaaaaagatttagctttctcgtcgagacatgtcccagacgcattacatgctcacaatcaattcaaattttcagttgtctggttaccagtagcacctcaatggagatccttaaggaaaatcttgaactctaatatttttagcggtaaccggctagacgcaaatcaacaccttcgatgccggaaagtcgaagaactaatcacatactgcagaaaatcttcccattcaggagacgccgttgatataggtagagctgcttttcgtacaagtctaaatctattgtcaaatactattttcagtaaggatttaactgacccataccaagattctgccaaggagtttaaagaactagtaggtaacatcatggtagaagctggtaaacctaatttagttgatttttttccctctctaaaaaaaattgatcctcaagggatccgacatagaatgactattcattttggaaaggtcctggaactctttggaggactaattaatgaaagactagaattaaaatcatctcaaaaaagtgatgaaaaaaatgatgttctagacgtttgcttaagcattagcaaagagaaccctgatgagatcgacagaacacacatagaaaggatgtgtctcgacctgttcgttgccggtacggatactacatcatctacgttggaatgggctatggctgaagtcctaagaaatccagaaaccttggttaaagctaaagcggaattggaagaagttatcggcaagggtaagatcttggccgaagcagatgtatcgaacttgccatatctgaggtgtattgttaaggaaactcttagaatccatccgccagtaccattcctaattcctagaaaggtggaaatggatgtagaagcgtgtggttacactgtgcctaaaaatagtcaggtttttgttaatgtttgggcgataggaagagatcctactttatgggaagatcccctgagttttaaacctgaaagatttatggcatcggaattggacgtaaggggtcgtgacttcgagcttcttcctttcggagctggcaggagaatttgcccaggtctgccattggctatccgtatggttcccgtcatgctgggttctttagttaatagctttaactggaagttggatggtggtattgcccctaaggagttagatatgggtgagaaatttggtatcactttggcaaaagcacaaagtctcagagcagtcccatcaccactggtgggtggcggctctggcggaagcacatctagcggtagttccggtggttggagacggtcctccggatctggtaaaaaggttgttgaaccacctaaactaatcgtgccaaaaagtgttgtcgaaccagaggaaatcgatgaaggtaagaaaaagtttactatattttttggcacccagacaggtacggctgagggcttcgcaaaggcactagccgaggaagctaaagctaggtatgaaaaggcagtcattaaggttatcgatatagacgattatgcggctgatgacgaggaatatgaagaaaaatttaggaaggaaacgttagcttttttcattctggctacttacggcgatggtgaaccaacagacaatgcagccagattctacaagtggtttgttgaagggaatgacaggggtgattggttaaaaaatttgcaatacggtgtttttggcctcgggaatcgccagtacgaacatttcaataagatagccaaagtggtagatgagaaggttgcggaacaaggtggcaaacgtatcgtccccttagttttaggcgatgacgatcagtgtattgaagacgatttcgcggcatggcgtgaaaatgtttggcccgaacttgataatcttcttagagacgaagacgatactactgtttcaacaacctacacggccgcaatccccgaatacagagttgttttcccagataagtcagatagcttaatttcagaagcaaatggtcacgctaatggttatgctaatgggaatacggtctacgatgctcaacacccatgcagatctaatgttgcagtccgcaaggagttacacactccagcatcagatcgctcatgtactcatcttgatttcgatatcgctggcaccggattgagctacgggactggagatcatgtaggtgtctattgtgataatttatctgaaaccgtcgaggaagctgagaggttgcttaatctgccgcctgaaacgtattttagcctccacgctgataaggaagacggcacacctttggcaggatcttctttgcctcctccctttccaccttgtacattacggactgctttgactaggtatgcggatttgctgaacacccccaaaaagagcgctttgctggccttagctgcatatgcttccgatcctaatgaagccgatagactaaaatacctagccagtcccgctggcaaggacgagtacgcacaatctcttgtcgctaaccaaagatcgcttttagaggtaatggccgagtttccctctgcaaaaccaccacttggggtttttttcgcggctattgctcctcgtcttcaaccaaggttctattcaatttcctctagtccgcgtatggctcctagtagaatccatgttacatgtgcattagtctacgaaaagactccaggtggtagaattcataagggagtttgttctacttggatgaaaaatgctattccgctggaagaatcacgtgactgctcgtgggcccccatctttgtacgtcaaagtaattttaagcttcctgcagaccctaaggtgccagtgataatgataggtccaggtaccggcttggctcctttcagaggattcttacaggaaaggttagctttgaaggaagaaggcgcagaattgggtactgctgtgttcttctttggttgtcgtaacagaaaaatggactacatttacgaagatgagctaaaccatttcttagaaattggtgccttgtccgaactattagtcgccttcagcagggagggccctacgaagcaatacgttcagcataaaatggctgaaaaagcgtcagacatttggcgaatgataagtgatggtgcctatgtgtatgtgtgcggggatgcaaagggtatggctcgtgatgtccacagaacactacatactatcgcccaagagcaaggctcgatggattctacacaagctgaaggttttgtaaagaatctacaaatgacgggtaggtacctaagagatgtttgg

SEQ ID NO: 1462 - DNA, 3459 bp, Artificial Sequence
  G8H-CPR engineered fusion
atggattttcttacaattttcataggtcctctgttggcaataatagctttgttttacgcgagattaactatctcgactcgcggtaaaaatttaccaccaggccccactccattgccttttatcggtaacttgcatttgcttggccatcatccacataaatcactagctagattagccaagacttacggcccattaatgctactgagactgggtagtgaaaacactgttgttgtatcaagtgctgctgtggcaaaggaggtattacagaaacacgacctagcctttagctcacgaagtatacctgacgcagttcacgcacatgatcaattcaagtacagcgtggtttggcttcctgtagcctccagatggcgttcccttcgtaagacaatgaactctaacattttttcaggttcgtgccttgatgccaatcaacatctacgttctaggaaggtcgaagaacttattgcgtattgtaaggaatcttgtcgtcgtgcagaagcagtagatgttggtagagcagcatttcgcacagctttaaatagtcttagtaatactattttttccagagatttggcagatccactatctgactcaggaaaggagtttaaagatgttgtcagtagtatcatgatggaagccggtaagccaaatagcgttgactactacccatttttatccagatttgaccctcagggcattagacgcagaacagcgatttatttcgataagttgatcaatattttcaaaggcttgattgatgaaagattagaaaagcgacggagccaatacgaagaagctacggatgttattgatattctcttaaatactattgagcaaaaccccgaagagattgatcgcacacatatagagagaatgtttttggatttgtttttagcaggcaccgataccacttcgtctaccgttgagtgggcaatggctgaagcaatgaagaatccggaaactatgaaaaaagccaaggcagagttagcacaagtcattggtaagggaaaaattgtgcaagaaacagatatacctcacctcccatatcttcaatgtatagtaaaggaaacacttagacttcatcctcctgtccctttcttaattccacgtcgcgtccacgaagatgtagatattttgggctacgtcgttccaaataactctcaggtcttcgtcaacatgtgggctatcggtcgggaccctgatatgtggaaaaatccactacagttcgatcccgatagatttcatgattctgaagttggcctaagaggtaaagattttgaacttatcccgttcggtgcgggtcgtagaatatgccctggactgccattggcaatgagaatggttccagtggtgttgggttctttactcaattcttttgattggaaggttgaaggtggtaaagaattagaaatgaatgagaaattcggaatcacattagaaaaagcacagccactgatggccgtcccgatagcattaggaggaggtagcggtggtagcactagtagtggtagtagcggtggatggagaagatcgtctggctcaggtaagaaagtagttgaaccaccaaaattgatcgttcccaagtcggttgtggaacctgaagaaattgatgaaggtaaaaagaaatttactatctttttcgggactcagactggcacagccgaaggtttcgccaaggccctcgcagaggaggctaaagcaagatatgaaaaagctgtcataaaagttattgatattgatgattatgctgctgacgatgaagaatacgaagagaaatttaggaaagaaactttagccttttttatacttgcaacgtacggggatggtgaaccaacagataacgcagctaggttctataaatggtttgtggaaggtaacgatagaggggattggttgaaaaatttacaatatggtgtattcggtttgggtaatcgacagtatgaacacttcaacaagattgccaaagtcgtcgatgagaaagtagcagagcaaggtgggaagagaattgtacctttagttttgggcgatgatgaccaatgtatagaagatgatttcgctgcctggagagaaaacgtttggccagaactagacaatttgctacgtgatgaggatgacaccaccgtttcaacgacttatactgctgctataccagagtatagggtggtttttccagataagtcggactctctgatctctgaagccaatggtcatgccaatggctatgcaaacggaaacactgtatatgacgctcaacacccctgtagatccaacgttgctgtgcgaaaggagcttcatactccggcctcggatcgttcttgcacacacctagacttcgatatcgcaggcaccggtctgagctatggaactggcgaccatgtcggagtttactgcgataatttgtccgaaacagttgaagaagctgagcgattgcttaacctgcctcctgagacttatttctccttacatgcagataaagaggatggtacgccacttgctggttcctccttaccgcccccttttccaccatgtacactacgaaccgcacttactcgttacgcagacttgttaaacacacctaagaaatcggcgttgctggctcttgcagcatacgcttcagatcctaatgaagccgatcgtttaaagtatctagcatctcctgcagggaaggacgaatatgcccaaagtttggtggctaatcaacgttctttattggaagttatggcagagttcccgagtgctaagccccccttaggtgttttcttcgcagctattgcccctagattgcaacctcgtttttattctatttcgtctagcccacgtatggccccatctagaattcatgtcacctgtgccttggtctacgagaagacaccaggtggtagaattcacaagggtgtgtgttcgacatggatgaagaacgccataccgctagaagaatctagggactgttcctgggcccctattttcgtaagacaaagcaattttaaattaccggctgatccgaaggtgccagttatcatgattggaccaggtacaggcctggcgccgtttcgaggttttctgcaggagaggttagctttgaaagaagaaggtgctgaattaggaaccgcagtttttttctttgggtgtagaaaccggaagatggattacatctatgaagatgaacttaaccatttcctagagattggggctctttcggaattgctggttgcttttagcagagaaggaccaactaagcaatatgtccaacacaagatggccgaaaaagcttccgatatctggagaatgatatctgacggagcttacgtgtatgtttgtggagacgcaaagggtatggctagggacgttcaccgcacattgcatactatagctcaagaacaaggttccatggattcaactcaagccgaaggctttgttaaaaatttgcaaatgactggtagatatttacgtgatgtatgg

SEQ ID NO: 1463 - DNA, 3879 bp, Artificial Sequence
  G8H-CPR-CYB5 engineered fusion
atggattttctgacaattttcattggtcctcttctggcaatcattgcattgttctacgctcgcttaacaattagcactcgtggaaagaatctacccccaggtcccactcctttaccatttattggtaatttacacttgctcggtcatcatccccataagtctttggcacgtcttgccaagacttatggtccattgatgttacttagactagggtctgaaaatactgtggtcgtatcttcggctgccgttgctaaagaagtattgcaaaaacatgatttggcctttagttctcgatccatacctgatgcagttcatgcacacgatcaattcaagtactccgtggtttggttgccagttgcctctagatggagatctttaagaaaaactatgaactccaatatcttttcgggctcctgcttagatgccaatcagcatttaagaagtaggaaggttgaagaattaatcgcctattgtaaagaaagctgtaggcgtgctgaagcagtagacgtcgggcgtgctgctttcagaaccgctttaaattctttgtcaaacacaattttttctcgagaccttgctgatccattatccgactctggtaaggaatttaaggacgttgtttcttcgatcatgatggaggcgggcaagccaaacagtgtagactactatccgttcctgtctcgattcgatccccaaggaatccgtagaaggaccgcaatctattttgataaactgattaacatcttcaagggtttgattgacgaacgtctcgaaaaaagaaggtcgcagtacgaagaggctacggatgtaatcgatatattacttaacactattgaacagaacccagaagaaatcgaccgaactcatatcgagagaatgttcttagatctctttttggctggtacagatacgacatcttcgacggtcgaatgggccatggctgaagccatgaagaacccagaaaccatgaagaaagctaaggcggaattagctcaagttatcggcaaggggaaaatagtccaagaaactgatataccacacctaccatatttgcaatgcatcgtaaaggagacactacgattacacccacctgtacccttccttatcccacgtcgtgttcatgaagacgtggacatattgggttatgtcgttccaaataactcacaagtgttcgttaacatgtgggccattgggagggacccagatatgtggaaaaatccattacaatttgatcccgaccgttttcatgattccgaagtcggtctgagaggtaaagattttgaattgattcccttcggcgctggcagaagaatttgcccaggattacctttggctatgcgtatggtgcctgttgttttaggatctctcttgaactccttcgattggaaggtcgaaggtggtaaagaactggaaatgaatgaaaagtttggaataactcttgaaaaagcacaacctttaatggcagtacccatcgcattaggtggcggctctggcggaagcacatctagcggtagttccggtggttggagacggtcctccggatctggtaaaaaggttgttgaaccacctaaactaatcgtgccaaaaagtgttgtcgaaccagaggaaatcgatgaaggtaagaaaaagtttactatattttttggcacccagacaggtacggctgagggcttcgcaaaggcactagccgaggaagctaaagctaggtatgaaaaggcagtcattaaggttatcgatatagacgattatgcggctgatgacgaggaatatgaagaaaaatttaggaaggaaacgttagcttttttcattctggctacttacggcgatggtgaaccaacagacaatgcagccagattctacaagtggtttgttgaagggaatgacaggggtgattggttaaaaaatttgcaatacggtgtttttggcctcgggaatcgccagtacgaacatttcaataagatagccaaagtggtagatgagaaggttgcggaacaaggtggcaaacgtatcgtccccttagttttaggcgatgacgatcagtgtattgaagacgatttcgcggcatggcgtgaaaatgtttggcccgaacttgataatcttcttagagacgaagacgatactactgtttcaacaacctacacggccgcaatccccgaatacagagttgttttcccagataagtcagatagcttaatttcagaagcaaatggtcacgctaatggttatgctaatgggaatacggtctacgatgctcaacacccatgcagatctaatgttgcagtccgcaaggagttacacactccagcatcagatcgctcatgtactcatcttgatttcgatatcgctggcaccggattgagctacgggactggagatcatgtaggtgtctattgtgataatttatctgaaaccgtcgaggaagctgagaggttgcttaatctgccgcctgaaacgtattttagcctccacgctgataaggaagacggcacacctttggcaggatcttctttgcctcctccctttccaccttgtacattacggactgctttgactaggtatgcggatttgctgaacacccccaaaaagagcgctttgctggccttagctgcatatgcttccgatcctaatgaagccgatagactaaaatacctagccagtcccgctggcaaggacgagtacgcacaatctcttgtcgctaaccaaagatcgcttttagaggtaatggccgagtttccctctgcaaaaccaccacttggggtttttttcgcggctattgctcctcgtcttcaaccaaggttctattcaatttcctctagtccgcgtatggctcctagtagaatccatgttacatgtgcattagtctacgaaaagactccaggtggtagaattcataagggagtttgttctacttggatgaaaaatgctattccgctggaagaatcacgtgactgctcgtgggcccccatctttgtacgtcaaagtaattttaagcttcctgcagaccctaaggtgccagtgataatgataggtccaggtaccggcttggctcctttcagaggattcttacaggaaaggttagctttgaaggaagaaggcgcagaattgggtactgctgtgttcttctttggttgtcgtaacagaaaaatggactacatttacgaagatgagctaaaccatttcttagaaattggtgccttgtccgaactattagtcgccttcagcagggagggccctacgaagcaatacgttcagcataaaatggctgaaaaagcgtcagacatttggcgaatgataagtgatggtgcctatgtgtatgtgtgcggggatgcaaagggtatggctcgtgatgtccacagaacactacatactatcgcccaagagcaaggctcgatggattctacacaagctgaaggttttgtaaagaatctacaaatgacgggtaggtacctaagagatgtttggggcagtacttcctctggtatggcgtccgatcaaaaattacataaatttgatgaagtatccaagcacaataagactaaagattgttggttaattattaatggtaaagtatacgatgtcactccatttatggatgatcatcctggcggtgacgaggttttgctgtctgcaactggcaaggatgcaactaacgactttgaagatgttggtcattcagactctgctagagaaatgatggacaagtattacattggggaaatggatatggcaaccgttccactaaaaagaacttacattccccctcaacaggcgcaatataatccagacaaaacaccagaatttgtgattaaaattctgcaatttttggttccattattgattttgggtcttgcatttgcggtacgtcattacaccaaagaaaaa

SEQ ID NO: 1464 - DNA, 3810 bp, Artificial Sequence
  G8H-CPR-CYB5 engineered fusion
atggattttctgacaattttcattggtcctcttctggcaatcattgcattgttctacgctcgcttaacaattagcactcgtggaaagaatctacccccaggtcccactcctttaccatttattggtaatttacacttgctcggtcatcatccccataagtctttggcacgtcttgccaagacttatggtccattgatgttacttagactagggtctgaaaatactgtggtcgtatcttcggctgccgttgctaaagaagtattgcaaaaacatgatttggcctttagttctcgatccatacctgatgcagttcatgcacacgatcaattcaagtactccgtggtttggttgccagttgcctctagatggagatctttaagaaaaactatgaactccaatatcttttcgggctcctgcttagatgccaatcagcatttaagaagtaggaaggttgaagaattaatcgcctattgtaaagaaagctgtaggcgtgctgaagcagtagacgtcgggcgtgctgctttcagaaccgctttaaattctttgtcaaacacaattttttctcgagaccttgctgatccattatccgactctggtaaggaatttaaggacgttgtttcttcgatcatgatggaggcgggcaagccaaacagtgtagactactatccgttcctgtctcgattcgatccccaaggaatccgtagaaggaccgcaatctattttgataaactgattaacatcttcaagggtttgattgacgaacgtctcgaaaaaagaaggtcgcagtacgaagaggctacggatgtaatcgatatattacttaacactattgaacagaacccagaagaaatcgaccgaactcatatcgagagaatgttcttagatctctttttggctggtacagatacgacatcttcgacggtcgaatgggccatggctgaagccatgaagaacccagaaaccatgaagaaagctaaggcggaattagctcaagttatcggcaaggggaaaatagtccaagaaactgatataccacacctaccatatttgcaatgcatcgtaaaggagacactacgattacacccacctgtacccttccttatcccacgtcgtgttcatgaagacgtggacatattgggttatgtcgttccaaataactcacaagtgttcgttaacatgtgggccattgggagggacccagatatgtggaaaaatccattacaatttgatcccgaccgttttcatgattccgaagtcggtctgagaggtaaagattttgaattgattcccttcggcgctggcagaagaatttgcccaggattacctttggctatgcgtatggtgcctgttgttttaggatctctcttgaactccttcgattggaaggtcgaaggtggtaaagaactggaaatgaatgaaaagtttggaataactcttgaaaaagcacaacctttaatggcagtacccatcgcattaggtggcggctctggcggaagcacatctagcggtagttccggtggttggagacggtcctccggatctggtaaaaaggttgttgaaccacctaaactaatcgtgccaaaaagtgttgtcgaaccagaggaaatcgatgaaggtaagaaaaagtttactatattttttggcacccagacaggtacggctgagggcttcgcaaaggcactagccgaggaagctaaagctaggtatgaaaaggcagtcattaaggttatcgatatagacgattatgcggctgatgacgaggaatatgaagaaaaatttaggaaggaaacgttagcttttttcattctggctacttacggcgatggtgaaccaacagacaatgcagccagattctacaagtggtttgttgaagggaatgacaggggtgattggttaaaaaatttgcaatacggtgtttttggcctcgggaatcgccagtacgaacatttcaataagatagccaaagtggtagatgagaaggttgcggaacaaggtggcaaacgtatcgtccccttagttttaggcgatgacgatcagtgtattgaagacgatttcgcggcatggcgtgaaaatgtttggcccgaacttgataatcttcttagagacgaagacgatactactgtttcaacaacctacacggccgcaatccccgaatacagagttgttttcccagataagtcagatagcttaatttcagaagcaaatggtcacgctaatggttatgctaatgggaatacggtctacgatgctcaacacccatgcagatctaatgttgcagtccgcaaggagttacacactccagcatcagatcgctcatgtactcatcttgatttcgatatcgctggcaccggattgagctacgggactggagatcatgtaggtgtctattgtgataatttatctgaaaccgtcgaggaagctgagaggttgcttaatctgccgcctgaaacgtattttagcctccacgctgataaggaagacggcacacctttggcaggatcttctttgcctcctccctttccaccttgtacattacggactgctttgactaggtatgcggatttgctgaacacccccaaaaagagcgctttgctggccttagctgcatatgcttccgatcctaatgaagccgatagactaaaatacctagccagtcccgctggcaaggacgagtacgcacaatctcttgtcgctaaccaaagatcgcttttagaggtaatggccgagtttccctctgcaaaaccaccacttggggtttttttcgcggctattgctcctcgtcttcaaccaaggttctattcaatttcctctagtccgcgtatggctcctagtagaatccatgttacatgtgcattagtctacgaaaagactccaggtggtagaattcataagggagtttgttctacttggatgaaaaatgctattccgctggaagaatcacgtgactgctcgtgggcccccatctttgtacgtcaaagtaattttaagcttcctgcagaccctaaggtgccagtgataatgataggtccaggtaccggcttggctcctttcagaggattcttacaggaaaggttagctttgaaggaagaaggcgcagaattgggtactgctgtgttcttctttggttgtcgtaacagaaaaatggactacatttacgaagatgagctaaaccatttcttagaaattggtgccttgtccgaactattagtcgccttcagcagggagggccctacgaagcaatacgttcagcataaaatggctgaaaaagcgtcagacatttggcgaatgataagtgatggtgcctatgtgtatgtgtgcggggatgcaaagggtatggctcgtgatgtccacagaacactacatactatcgcccaagagcaaggctcgatggattctacacaagctgaaggttttgtaaagaatctacaaatgacgggtaggtacctaagagatgtttggggcagtacttcctctggtatggcgtccgatcaaaaattacataaatttgatgaagtatccaagcacaataagactaaagattgttggttaattattaatggtaaagtatacgatgtcactccatttatggatgatcatcctggcggtgacgaggttttgctgtctgcaactggcaaggatgcaactaacgactttgaagatgttggtcattcagactctgctagagaaatgatggacaagtattacattggggaaatggatatggcaaccgttccactaaaaagaacttacattccccctcaacaggcgcaatataatccagacaaaacaccagaatacaccaaagaaaaa

SEQ ID NO: 1465 - DNA, 3795 bp, Artificial Sequence
  G8H-CPR-CYB5 engineered fusion
atggattttctgacaattttcattggtcctcttctggcaatcattgcattgttctacgctcgcttaacaattagcactcgtggaaagaatctacccccaggtcccactcctttaccatttattggtaatttacacttgctcggtcatcatccccataagtctttggcacgtcttgccaagacttatggtccattgatgttacttagactagggtctgaaaatactgtggtcgtatcttcggctgccgttgctaaagaagtattgcaaaaacatgatttggcctttagttctcgatccatacctgatgcagttcatgcacacgatcaattcaagtactccgtggtttggttgccagttgcctctagatggagatctttaagaaaaactatgaactccaatatcttttcgggctcctgcttagatgccaatcagcatttaagaagtaggaaggttgaagaattaatcgcctattgtaaagaaagctgtaggcgtgctgaagcagtagacgtcgggcgtgctgctttcagaaccgctttaaattctttgtcaaacacaattttttctcgagaccttgctgatccattatccgactctggtaaggaatttaaggacgttgtttcttcgatcatgatggaggcgggcaagccaaacagtgtagactactatccgttcctgtctcgattcgatccccaaggaatccgtagaaggaccgcaatctattttgataaactgattaacatcttcaagggtttgattgacgaacgtctcgaaaaaagaaggtcgcagtacgaagaggctacggatgtaatcgatatattacttaacactattgaacagaacccagaagaaatcgaccgaactcatatcgagagaatgttcttagatctctttttggctggtacagatacgacatcttcgacggtcgaatgggccatggctgaagccatgaagaacccagaaaccatgaagaaagctaaggcggaattagctcaagttatcggcaaggggaaaatagtccaagaaactgatataccacacctaccatatttgcaatgcatcgtaaaggagacactacgattacacccacctgtacccttccttatcccacgtcgtgttcatgaagacgtggacatattgggttatgtcgttccaaataactcacaagtgttcgttaacatgtgggccattgggagggacccagatatgtggaaaaatccattacaatttgatcccgaccgttttcatgattccgaagtcggtctgagaggtaaagattttgaattgattcccttcggcgctggcagaagaatttgcccaggattacctttggctatgcgtatggtgcctgttgttttaggatctctcttgaactccttcgattggaaggtcgaaggtggtaaagaactggaaatgaatgaaaagtttggaataactcttgaaaaagcacaacctttaatggcagtacccatcgcattaggtggcggctctggcggaagcacatctagcggtagttccggtggttggagacggtcctccggatctggtaaaaaggttgttgaaccacctaaactaatcgtgccaaaaagtgttgtcgaaccagaggaaatcgatgaaggtaagaaaaagtttactatattttttggcacccagacaggtacggctgagggcttcgcaaaggcactagccgaggaagctaaagctaggtatgaaaaggcagtcattaaggttatcgatatagacgattatgcggctgatgacgaggaatatgaagaaaaatttaggaaggaaacgttagcttttttcattctggctacttacggcgatggtgaaccaacagacaatgcagccagattctacaagtggtttgttgaagggaatgacaggggtgattggttaaaaaatttgcaatacggtgtttttggcctcgggaatcgccagtacgaacatttcaataagatagccaaagtggtagatgagaaggttgcggaacaaggtggcaaacgtatcgtccccttagttttaggcgatgacgatcagtgtattgaagacgatttcgcggcatggcgtgaaaatgtttggcccgaacttgataatcttcttagagacgaagacgatactactgtttcaacaacctacacggccgcaatccccgaatacagagttgttttcccagataagtcagatagcttaatttcagaagcaaatggtcacgctaatggttatgctaatgggaatacggtctacgatgctcaacacccatgcagatctaatgttgcagtccgcaaggagttacacactccagcatcagatcgctcatgtactcatcttgatttcgatatcgctggcaccggattgagctacgggactggagatcatgtaggtgtctattgtgataatttatctgaaaccgtcgaggaagctgagaggttgcttaatctgccgcctgaaacgtattttagcctccacgctgataaggaagacggcacacctttggcaggatcttctttgcctcctccctttccaccttgtacattacggactgctttgactaggtatgcggatttgctgaacacccccaaaaagagcgctttgctggccttagctgcatatgcttccgatcctaatgaagccgatagactaaaatacctagccagtcccgctggcaaggacgagtacgcacaatctcttgtcgctaaccaaagatcgcttttagaggtaatggccgagtttccctctgcaaaaccaccacttggggtttttttcgcggctattgctcctcgtcttcaaccaaggttctattcaatttcctctagtccgcgtatggctcctagtagaatccatgttacatgtgcattagtctacgaaaagactccaggtggtagaattcataagggagtttgttctacttggatgaaaaatgctattccgctggaagaatcacgtgactgctcgtgggcccccatctttgtacgtcaaagtaattttaagcttcctgcagaccctaaggtgccagtgataatgataggtccaggtaccggcttggctcctttcagaggattcttacaggaaaggttagctttgaaggaagaaggcgcagaattgggtactgctgtgttcttctttggttgtcgtaacagaaaaatggactacatttacgaagatgagctaaaccatttcttagaaattggtgccttgtccgaactattagtcgccttcagcagggagggccctacgaagcaatacgttcagcataaaatggctgaaaaagcgtcagacatttggcgaatgataagtgatggtgcctatgtgtatgtgtgcggggatgcaaagggtatggctcgtgatgtccacagaacactacatactatcgcccaagagcaaggctcgatggattctacacaagctgaaggttttgtaaagaatctacaaatgacgggtaggtacctaagagatgtttggggcagtacttcctctggtatggcgtccgatcaaaaattacataaatttgatgaagtatccaagcacaataagactaaagattgttggttaattattaatggtaaagtatacgatgtcactccatttatggatgatcatcctggcggtgacgaggttttgctgtctgcaactggcaaggatgcaactaacgactttgaagatgttggtcattcagactctgctagagaaatgatggacaagtattacattggggaaatggatatggcaaccgttccactaaaaagaacttacattccccctcaacaggcgcaatataatccagacaaaacaccagaa

SEQ ID NO: 1466 - DNA, 3891 bp, Artificial Sequence
  G8H-CPR-CYB5 engineered fusion
atggattttctgacaattttcattggtcctcttctggcaatcattgcattgttctacgctcgcttaacaattagcactcgtggaaagaatctacccccaggtcccactcctttaccatttattggtaatttacacttgctcggtcatcatccccataagtctttggcacgtcttgccaagacttatggtccattgatgttacttagactagggtctgaaaatactgtggtcgtatcttcggctgccgttgctaaagaagtattgcaaaaacatgatttggcctttagttctcgatccatacctgatgcagttcatgcacacgatcaattcaagtactccgtggtttggttgccagttgcctctagatggagatctttaagaaaaactatgaactccaatatcttttcgggctcctgcttagatgccaatcagcatttaagaagtaggaaggttgaagaattaatcgcctattgtaaagaaagctgtaggcgtgctgaagcagtagacgtcgggcgtgctgctttcagaaccgctttaaattctttgtcaaacacaattttttctcgagaccttgctgatccattatccgactctggtaaggaatttaaggacgttgtttcttcgatcatgatggaggcgggcaagccaaacagtgtagactactatccgttcctgtctcgattcgatccccaaggaatccgtagaaggaccgcaatctattttgataaactgattaacatcttcaagggtttgattgacgaacgtctcgaaaaaagaaggtcgcagtacgaagaggctacggatgtaatcgatatattacttaacactattgaacagaacccagaagaaatcgaccgaactcatatcgagagaatgttcttagatctctttttggctggtacagatacgacatcttcgacggtcgaatgggccatggctgaagccatgaagaacccagaaaccatgaagaaagctaaggcggaattagctcaagttatcggcaaggggaaaatagtccaagaaactgatataccacacctaccatatttgcaatgcatcgtaaaggagacactacgattacacccacctgtacccttccttatcccacgtcgtgttcatgaagacgtggacatattgggttatgtcgttccaaataactcacaagtgttcgttaacatgtgggccattgggagggacccagatatgtggaaaaatccattacaatttgatcccgaccgttttcatgattccgaagtcggtctgagaggtaaagattttgaattgattcccttcggcgctggcagaagaatttgcccaggattacctttggctatgcgtatggtgcctgttgttttaggatctctcttgaactccttcgattggaaggtcgaaggtggtaaagaactggaaatgaatgaaaagtttggaataactcttgaaaaagcacaacctttaatggcagtacccatcgcattaggtggcggctctggcggaagcacatctagcggtagttccggtggttggagacggtcctccggatctggtaaaaaggttgttgaaccacctaaactaatcgtgccaaaaagtgttgtcgaaccagaggaaatcgatgaaggtaagaaaaagtttactatattttttggcacccagacaggtacggctgagggcttcgcaaaggcactagccgaggaagctaaagctaggtatgaaaaggcagtcattaaggttatcgatatagacgattatgcggctgatgacgaggaatatgaagaaaaatttaggaaggaaacgttagcttttttcattctggctacttacggcgatggtgaaccaacagacaatgcagccagattctacaagtggtttgttgaagggaatgacaggggtgattggttaaaaaatttgcaatacggtgtttttggcctcgggaatcgccagtacgaacatttcaataagatagccaaagtggtagatgagaaggttgcggaacaaggtggcaaacgtatcgtccccttagttttaggcgatgacgatcagtgtattgaagacgatttcgcggcatggcgtgaaaatgtttggcccgaacttgataatcttcttagagacgaagacgatactactgtttcaacaacctacacggccgcaatccccgaatacagagttgttttcccagataagtcagatagcttaatttcagaagcaaatggtcacgctaatggttatgctaatgggaatacggtctacgatgctcaacacccatgcagatctaatgttgcagtccgcaaggagttacacactccagcatcagatcgctcatgtactcatcttgatttcgatatcgctggcaccggattgagctacgggactggagatcatgtaggtgtctattgtgataatttatctgaaaccgtcgaggaagctgagaggttgcttaatctgccgcctgaaacgtattttagcctccacgctgataaggaagacggcacacctttggcaggatcttctttgcctcctccctttccaccttgtacattacggactgctttgactaggtatgcggatttgctgaacacccccaaaaagagcgctttgctggccttagctgcatatgcttccgatcctaatgaagccgatagactaaaatacctagccagtcccgctggcaaggacgagtacgcacaatctcttgtcgctaaccaaagatcgcttttagaggtaatggccgagtttccctctgcaaaaccaccacttggggtttttttcgcggctattgctcctcgtcttcaaccaaggttctattcaatttcctctagtccgcgtatggctcctagtagaatccatgttacatgtgcattagtctacgaaaagactccaggtggtagaattcataagggagtttgttctacttggatgaaaaatgctattccgctggaagaatcacgtgactgctcgtgggcccccatctttgtacgtcaaagtaattttaagcttcctgcagaccctaaggtgccagtgataatgataggtccaggtaccggcttggctcctttcagaggattcttacaggaaaggttagctttgaaggaagaaggcgcagaattgggtactgctgtgttcttctttggttgtcgtaacagaaaaatggactacatttacgaagatgagctaaaccatttcttagaaattggtgccttgtccgaactattagtcgccttcagcagggagggccctacgaagcaatacgttcagcataaaatggctgaaaaagcgtcagacatttggcgaatgataagtgatggtgcctatgtgtatgtgtgcggggatgcaaagggtatggctcgtgatgtccacagaacactacatactatcgcccaagagcaaggctcgatggattctacacaagctgaaggttttgtaaagaatctacaaatgacgggtaggtacctaagagatgtttggggcagtacttcctctggtatgccgacattaactaagttatacacaatggaagaagcttctcaacataatacaaacgaagactgttggatagtcatagatggtaaagtctatgacgtcagctcttatgtcgatgatcatcctggcggtgatgacatactagttggagcaacaggtaaagatgctacagatgaattcgaagatgctggtcattctaaaagcgcaagagaattaatggagaaattttgtattggggaattagaagaaaccacaccaagtattccagaattggatatcgtctcacaaaagcaaaagatgaacgatcttccacataagatcttgaattttactaaacaatattggttcgcatcaattactgtggcaggtttgtccgtggtcgttgggtatctttgcatccgaaaaaagcaaacaact

SEQ ID NO: 1467 - DNA, 3831 bp, Artificial Sequence
  G8H-CPR-CYB5 engineered fusion
atggattttctgacaattttcattggtcctcttctggcaatcattgcattgttctacgctcgcttaacaattagcactcgtggaaagaatctacccccaggtcccactcctttaccatttattggtaatttacacttgctcggtcatcatccccataagtctttggcacgtcttgccaagacttatggtccattgatgttacttagactagggtctgaaaatactgtggtcgtatcttcggctgccgttgctaaagaagtattgcaaaaacatgatttggcctttagttctcgatccatacctgatgcagttcatgcacacgatcaattcaagtactccgtggtttggttgccagttgcctctagatggagatctttaagaaaaactatgaactccaatatcttttcgggctcctgcttagatgccaatcagcatttaagaagtaggaaggttgaagaattaatcgcctattgtaaagaaagctgtaggcgtgctgaagcagtagacgtcgggcgtgctgctttcagaaccgctttaaattctttgtcaaacacaattttttctcgagaccttgctgatccattatccgactctggtaaggaatttaaggacgttgtttcttcgatcatgatggaggcgggcaagccaaacagtgtagactactatccgttcctgtctcgattcgatccccaaggaatccgtagaaggaccgcaatctattttgataaactgattaacatcttcaagggtttgattgacgaacgtctcgaaaaaagaaggtcgcagtacgaagaggctacggatgtaatcgatatattacttaacactattgaacagaacccagaagaaatcgaccgaactcatatcgagagaatgttcttagatctctttttggctggtacagatacgacatcttcgacggtcgaatgggccatggctgaagccatgaagaacccagaaaccatgaagaaagctaaggcggaattagctcaagttatcggcaaggggaaaatagtccaagaaactgatataccacacctaccatatttgcaatgcatcgtaaaggagacactacgattacacccacctgtacccttccttatcccacgtcgtgttcatgaagacgtggacatattgggttatgtcgttccaaataactcacaagtgttcgttaacatgtgggccattgggagggacccagatatgtggaaaaatccattacaatttgatcccgaccgttttcatgattccgaagtcggtctgagaggtaaagattttgaattgattcccttcggcgctggcagaagaatttgcccaggattacctttggctatgcgtatggtgcctgttgttttaggatctctcttgaactccttcgattggaaggtcgaaggtggtaaagaactggaaatgaatgaaaagtttggaataactcttgaaaaagcacaacctttaatggcagtacccatcgcattaggtggcggctctggcggaagcacatctagcggtagttccggtggttggagacggtcctccggatctggtaaaaaggttgttgaaccacctaaactaatcgtgccaaaaagtgttgtcgaaccagaggaaatcgatgaaggtaagaaaaagtttactatattttttggcacccagacaggtacggctgagggcttcgcaaaggcactagccgaggaagctaaagctaggtatgaaaaggcagtcattaaggttatcgatatagacgattatgcggctgatgacgaggaatatgaagaaaaatttaggaaggaaacgttagcttttttcattctggctacttacggcgatggtgaaccaacagacaatgcagccagattctacaagtggtttgttgaagggaatgacaggggtgattggttaaaaaatttgcaatacggtgtttttggcctcgggaatcgccagtacgaacatttcaataagatagccaaagtggtagatgagaaggttgcggaacaaggtggcaaacgtatcgtccccttagttttaggcgatgacgatcagtgtattgaagacgatttcgcggcatggcgtgaaaatgtttggcccgaacttgataatcttcttagagacgaagacgatactactgtttcaacaacctacacggccgcaatccccgaatacagagttgttttcccagataagtcagatagcttaatttcagaagcaaatggtcacgctaatggttatgctaatgggaatacggtctacgatgctcaacacccatgcagatctaatgttgcagtccgcaaggagttacacactccagcatcagatcgctcatgtactcatcttgatttcgatatcgctggcaccggattgagctacgggactggagatcatgtaggtgtctattgtgataatttatctgaaaccgtcgaggaagctgagaggttgcttaatctgccgcctgaaacgtattttagcctccacgctgataaggaagacggcacacctttggcaggatcttctttgcctcctccctttccaccttgtacattacggactgctttgactaggtatgcggatttgctgaacacccccaaaaagagcgctttgctggccttagctgcatatgcttccgatcctaatgaagccgatagactaaaatacctagccagtcccgctggcaaggacgagtacgcacaatctcttgtcgctaaccaaagatcgcttttagaggtaatggccgagtttccctctgcaaaaccaccacttggggtttttttcgcggctattgctcctcgtcttcaaccaaggttctattcaatttcctctagtccgcgtatggctcctagtagaatccatgttacatgtgcattagtctacgaaaagactccaggtggtagaattcataagggagtttgttctacttggatgaaaaatgctattccgctggaagaatcacgtgactgctcgtgggcccccatctttgtacgtcaaagtaattttaagcttcctgcagaccctaaggtgccagtgataatgataggtccaggtaccggcttggctcctttcagaggattcttacaggaaaggttagctttgaaggaagaaggcgcagaattgggtactgctgtgttcttctttggttgtcgtaacagaaaaatggactacatttacgaagatgagctaaaccatttcttagaaattggtgccttgtccgaactattagtcgccttcagcagggagggccctacgaagcaatacgttcagcataaaatggctgaaaaagcgtcagacatttggcgaatgataagtgatggtgcctatgtgtatgtgtgcggggatgcaaagggtatggctcgtgatgtccacagaacactacatactatcgcccaagagcaaggctcgatggattctacacaagctgaaggttttgtaaagaatctacaaatgacgggtaggtacctaagagatgtttggggcagtacttcctctggtatgccgacattaactaagttatacacaatggaagaagcttctcaacataatacaaacgaagactgttggatagtcatagatggtaaagtctatgacgtcagctcttatgtcgatgatcatcctggcggtgatgacatactagttggagcaacaggtaaagatgctacagatgaattcgaagatgctggtcattctaaaagcgcaagagaattaatggagaaattttgtattggggaattagaagaaaccacaccaagtattccagaattggatatcgtctcacaaaagcaaaagatgaacgatcttccacataagatcttgaattttactaaacaacgaaaaaagcaaacaact

SEQ ID NO: 1468 - DNA, 3813 bp, Artificial Sequence
  G8H-CPR-CYB5 engineered fusion
atggattttctgacaattttcattggtcctcttctggcaatcattgcattgttctacgctcgcttaacaattagcactcgtggaaagaatctacccccaggtcccactcctttaccatttattggtaatttacacttgctcggtcatcatccccataagtctttggcacgtcttgccaagacttatggtccattgatgttacttagactagggtctgaaaatactgtggtcgtatcttcggctgccgttgctaaagaagtattgcaaaaacatgatttggcctttagttctcgatccatacctgatgcagttcatgcacacgatcaattcaagtactccgtggtttggttgccagttgcctctagatggagatctttaagaaaaactatgaactccaatatcttttcgggctcctgcttagatgccaatcagcatttaagaagtaggaaggttgaagaattaatcgcctattgtaaagaaagctgtaggcgtgctgaagcagtagacgtcgggcgtgctgctttcagaaccgctttaaattctttgtcaaacacaattttttctcgagaccttgctgatccattatccgactctggtaaggaatttaaggacgttgtttcttcgatcatgatggaggcgggcaagccaaacagtgtagactactatccgttcctgtctcgattcgatccccaaggaatccgtagaaggaccgcaatctattttgataaactgattaacatcttcaagggtttgattgacgaacgtctcgaaaaaagaaggtcgcagtacgaagaggctacggatgtaatcgatatattacttaacactattgaacagaacccagaagaaatcgaccgaactcatatcgagagaatgttcttagatctctttttggctggtacagatacgacatcttcgacggtcgaatgggccatggctgaagccatgaagaacccagaaaccatgaagaaagctaaggcggaattagctcaagttatcggcaaggggaaaatagtccaagaaactgatataccacacctaccatatttgcaatgcatcgtaaaggagacactacgattacacccacctgtacccttccttatcccacgtcgtgttcatgaagacgtggacatattgggttatgtcgttccaaataactcacaagtgttcgttaacatgtgggccattgggagggacccagatatgtggaaaaatccattacaatttgatcccgaccgttttcatgattccgaagtcggtctgagaggtaaagattttgaattgattcccttcggcgctggcagaagaatttgcccaggattacctttggctatgcgtatggtgcctgttgttttaggatctctcttgaactccttcgattggaaggtcgaaggtggtaaagaactggaaatgaatgaaaagtttggaataactcttgaaaaagcacaacctttaatggcagtacccatcgcattaggtggcggctctggcggaagcacatctagcggtagttccggtggttggagacggtcctccggatctggtaaaaaggttgttgaaccacctaaactaatcgtgccaaaaagtgttgtcgaaccagaggaaatcgatgaaggtaagaaaaagtttactatattttttggcacccagacaggtacggctgagggcttcgcaaaggcactagccgaggaagctaaagctaggtatgaaaaggcagtcattaaggttatcgatatagacgattatgcggctgatgacgaggaatatgaagaaaaatttaggaaggaaacgttagcttttttcattctggctacttacggcgatggtgaaccaacagacaatgcagccagattctacaagtggtttgttgaagggaatgacaggggtgattggttaaaaaatttgcaatacggtgtttttggcctcgggaatcgccagtacgaacatttcaataagatagccaaagtggtagatgagaaggttgcggaacaaggtggcaaacgtatcgtccccttagttttaggcgatgacgatcagtgtattgaagacgatttcgcggcatggcgtgaaaatgtttggcccgaacttgataatcttcttagagacgaagacgatactactgtttcaacaacctacacggccgcaatccccgaatacagagttgttttcccagataagtcagatagcttaatttcagaagcaaatggtcacgctaatggttatgctaatgggaatacggtctacgatgctcaacacccatgcagatctaatgttgcagtccgcaaggagttacacactccagcatcagatcgctcatgtactcatcttgatttcgatatcgctggcaccggattgagctacgggactggagatcatgtaggtgtctattgtgataatttatctgaaaccgtcgaggaagctgagaggttgcttaatctgccgcctgaaacgtattttagcctccacgctgataaggaagacggcacacctttggcaggatcttctttgcctcctccctttccaccttgtacattacggactgctttgactaggtatgcggatttgctgaacacccccaaaaagagcgctttgctggccttagctgcatatgcttccgatcctaatgaagccgatagactaaaatacctagccagtcccgctggcaaggacgagtacgcacaatctcttgtcgctaaccaaagatcgcttttagaggtaatggccgagtttccctctgcaaaaccaccacttggggtttttttcgcggctattgctcctcgtcttcaaccaaggttctattcaatttcctctagtccgcgtatggctcctagtagaatccatgttacatgtgcattagtctacgaaaagactccaggtggtagaattcataagggagtttgttctacttggatgaaaaatgctattccgctggaagaatcacgtgactgctcgtgggcccccatctttgtacgtcaaagtaattttaagcttcctgcagaccctaaggtgccagtgataatgataggtccaggtaccggcttggctcctttcagaggattcttacaggaaaggttagctttgaaggaagaaggcgcagaattgggtactgctgtgttcttctttggttgtcgtaacagaaaaatggactacatttacgaagatgagctaaaccatttcttagaaattggtgccttgtccgaactattagtcgccttcagcagggagggccctacgaagcaatacgttcagcataaaatggctgaaaaagcgtcagacatttggcgaatgataagtgatggtgcctatgtgtatgtgtgcggggatgcaaagggtatggctcgtgatgtccacagaacactacatactatcgcccaagagcaaggctcgatggattctacacaagctgaaggttttgtaaagaatctacaaatgacgggtaggtacctaagagatgtttggggcagtacttcctctggtatgccgacattaactaagttatacacaatggaagaagcttctcaacataatacaaacgaagactgttggatagtcatagatggtaaagtctatgacgtcagctcttatgtcgatgatcatcctggcggtgatgacatactagttggagcaacaggtaaagatgctacagatgaattcgaagatgctggtcattctaaaagcgcaagagaattaatggagaaattttgtattggggaattagaagaaaccacaccaagtattccagaattggatatcgtctcacaaaagcaaaagatgaacgatcttccacataagatcttgaattttactaaacaa

SEQ ID NO: 1469 - DNA, 3759 bp, Artificial Sequence
  G8H-CPR-CYB5 engineered fusion
atggctttgttactggcggtatttcgcttaacaattagcactcgtggaaagaatctacccccaggtcccactcctttaccatttattggtaatttacacttgctcggtcatcatccccataagtctttggcacgtcttgccaagacttatggtccattgatgttacttagactagggtctgaaaatactgtggtcgtatcttcggctgccgttgctaaagaagtattgcaaaaacatgatttggcctttagttctcgatccatacctgatgcagttcatgcacacgatcaattcaagtactccgtggtttggttgccagttgcctctagatggagatctttaagaaaaactatgaactccaatatcttttcgggctcctgcttagatgccaatcagcatttaagaagtaggaaggttgaagaattaatcgcctattgtaaagaaagctgtaggcgtgctgaagcagtagacgtcgggcgtgctgctttcagaaccgctttaaattctttgtcaaacacaattttttctcgagaccttgctgatccattatccgactctggtaaggaatttaaggacgttgtttcttcgatcatgatggaggcgggcaagccaaacagtgtagactactatccgttcctgtctcgattcgatccccaaggaatccgtagaaggaccgcaatctattttgataaactgattaacatcttcaagggtttgattgacgaacgtctcgaaaaaagaaggtcgcagtacgaagaggctacggatgtaatcgatatattacttaacactattgaacagaacccagaagaaatcgaccgaactcatatcgagagaatgttcttagatctctttttggctggtacagatacgacatcttcgacggtcgaatgggccatggctgaagccatgaagaacccagaaaccatgaagaaagctaaggcggaattagctcaagttatcggcaaggggaaaatagtccaagaaactgatataccacacctaccatatttgcaatgcatcgtaaaggagacactacgattacacccacctgtacccttccttatcccacgtcgtgttcatgaagacgtggacatattgggttatgtcgttccaaataactcacaagtgttcgttaacatgtgggccattgggagggacccagatatgtggaaaaatccattacaatttgatcccgaccgttttcatgattccgaagtcggtctgagaggtaaagattttgaattgattcccttcggcgctggcagaagaatttgcccaggattacctttggctatgcgtatggtgcctgttgttttaggatctctcttgaactccttcgattggaaggtcgaaggtggtaaagaactggaaatgaatgaaaagtttggaataactcttgaaaaagcacaacctttaatggcagtacccatcgcattaggtggcggctctggcggaagcacatctagcggtagttccggtggttggagacggtcctccggatctggtaaaaaggttgttgaaccacctaaactaatcgtgccaaaaagtgttgtcgaaccagaggaaatcgatgaaggtaagaaaaagtttactatattttttggcacccagacaggtacggctgagggcttcgcaaaggcactagccgaggaagctaaagctaggtatgaaaaggcagtcattaaggttatcgatatagacgattatgcggctgatgacgaggaatatgaagaaaaatttaggaaggaaacgttagcttttttcattctggctacttacggcgatggtgaaccaacagacaatgcagccagattctacaagtggtttgttgaagggaatgacaggggtgattggttaaaaaatttgcaatacggtgtttttggcctcgggaatcgccagtacgaacatttcaataagatagccaaagtggtagatgagaaggttgcggaacaaggtggcaaacgtatcgtccccttagttttaggcgatgacgatcagtgtattgaagacgatttcgcggcatggcgtgaaaatgtttggcccgaacttgataatcttcttagagacgaagacgatactactgtttcaacaacctacacggccgcaatccccgaatacagagttgttttcccagataagtcagatagcttaatttcagaagcaaatggtcacgctaatggttatgctaatgggaatacggtctacgatgctcaacacccatgcagatctaatgttgcagtccgcaaggagttacacactccagcatcagatcgctcatgtactcatcttgatttcgatatcgctggcaccggattgagctacgggactggagatcatgtaggtgtctattgtgataatttatctgaaaccgtcgaggaagctgagaggttgcttaatctgccgcctgaaacgtattttagcctccacgctgataaggaagacggcacacctttggcaggatcttctttgcctcctccctttccaccttgtacattacggactgctttgactaggtatgcggatttgctgaacacccccaaaaagagcgctttgctggccttagctgcatatgcttccgatcctaatgaagccgatagactaaaatacctagccagtcccgctggcaaggacgagtacgcacaatctcttgtcgctaaccaaagatcgcttttagaggtaatggccgagtttccctctgcaaaaccaccacttggggtttttttcgcggctattgctcctcgtcttcaaccaaggttctattcaatttcctctagtccgcgtatggctcctagtagaatccatgttacatgtgcattagtctacgaaaagactccaggtggtagaattcataagggagtttgttctacttggatgaaaaatgctattccgctggaagaatcacgtgactgctcgtgggcccccatctttgtacgtcaaagtaattttaagcttcctgcagaccctaaggtgccagtgataatgataggtccaggtaccggcttggctcctttcagaggattcttacaggaaaggttagctttgaaggaagaaggcgcagaattgggtactgctgtgttcttctttggttgtcgtaacagaaaaatggactacatttacgaagatgagctaaaccatttcttagaaattggtgccttgtccgaactattagtcgccttcagcagggagggccctacgaagcaatacgttcagcataaaatggctgaaaaagcgtcagacatttggcgaatgataagtgatggtgcctatgtgtatgtgtgcggggatgcaaagggtatggctcgtgatgtccacagaacactacatactatcgcccaagagcaaggctcgatggattctacacaagctgaaggttttgtaaagaatctacaaatgacgggtaggtacctaagagatgtttggggcagtacttcctctggtatggcgtccgatcaaaaattacataaatttgatgaagtatccaagcacaataagactaaagattgttggttaattattaatggtaaagtatacgatgtcactccatttatggatgatcatcctggcggtgacgaggttttgctgtctgcaactggcaaggatgcaactaacgactttgaagatgttggtcattcagactctgctagagaaatgatggacaagtattacattggggaaatggatatggcaaccgttccactaaaaagaacttacattccccctcaacaggcgcaatataatccagacaaaacaccagaa

SEQ ID NO: 1470 - DNA, 3906 bp, Artificial Sequence
  G8H-CPR-CYB5 engineered fusion
atggattttctgacaattttcattggtcctcttctggcaatcattgcattgttctacgctcgcttaacaattagcactcgtggaaagaatctacccccaggtcccactcctttaccatttattggtaatttacacttgctcggtcatcatccccataagtctttggcacgtcttgccaagacttatggtccattgatgttacttagactagggtctgaaaatactgtggtcgtatcttcggctgccgttgctaaagaagtattgcaaaaacatgatttggcctttagttctcgatccatacctgatgcagttcatgcacacgatcaattcaagtactccgtggtttggttgccagttgcctctagatggagatctttaagaaaaactatgaactccaatatcttttcgggctcctgcttagatgccaatcagcatttaagaagtaggaaggttgaagaattaatcgcctattgtaaagaaagctgtaggcgtgctgaagcagtagacgtcgggcgtgctgctttcagaaccgctttaaattctttgtcaaacacaattttttctcgagaccttgctgatccattatccgactctggtaaggaatttaaggacgttgtttcttcgatcatgatggaggcgggcaagccaaacagtgtagactactatccgttcctgtctcgattcgatccccaaggaatccgtagaaggaccgcaatctattttgataaactgattaacatcttcaagggtttgattgacgaacgtctcgaaaaaagaaggtcgcagtacgaagaggctacggatgtaatcgatatattacttaacactattgaacagaacccagaagaaatcgaccgaactcatatcgagagaatgttcttagatctctttttggctggtacagatacgacatcttcgacggtcgaatgggccatggctgaagccatgaagaacccagaaaccatgaagaaagctaaggcggaattagctcaagttatcggcaaggggaaaatagtccaagaaactgatataccacacctaccatatttgcaatgcatcgtaaaggagacactacgattacacccacctgtacccttccttatcccacgtcgtgttcatgaagacgtggacatattgggttatgtcgttccaaataactcacaagtgttcgttaacatgtgggccattgggagggacccagatatgtggaaaaatccattacaatttgatcccgaccgttttcatgattccgaagtcggtctgagaggtaaagattttgaattgattcccttcggcgctggcagaagaatttgcccaggattacctttggctatgcgtatggtgcctgttgttttaggatctctcttgaactccttcgattggaaggtcgaaggtggtaaagaactggaaatgaatgaaaagtttggaataactcttgaaaaagcacaacctttaatggcagtacccatcgcattaggtggcggctctggcggaagcacatctagcggtagttccggtggttggagacggtcctccggatctggtaaaaaggttgttgaaccacctaaactaatcgtgccaaaaagtgttgtcgaaccagaggaaatcgatgaaggtaagaaaaagtttactatattttttggcacccagacaggtacggctgagggcttcgcaaaggcactagccgaggaagctaaagctaggtatgaaaaggcagtcattaaggttatcgatatagacgattatgcggctgatgacgaggaatatgaagaaaaatttaggaaggaaacgttagcttttttcattctggctacttacggcgatggtgaaccaacagacaatgcagccagattctacaagtggtttgttgaagggaatgacaggggtgattggttaaaaaatttgcaatacggtgtttttggcctcgggaatcgccagtacgaacatttcaataagatagccaaagtggtagatgagaaggttgcggaacaaggtggcaaacgtatcgtccccttagttttaggcgatgacgatcagtgtattgaagacgatttcgcggcatggcgtgaaaatgtttggcccgaacttgataatcttcttagagacgaagacgatactactgtttcaacaacctacacggccgcaatccccgaatacagagttgttttcccagataagtcagatagcttaatttcagaagcaaatggtcacgctaatggttatgctaatgggaatacggtctacgatgctcaacacccatgcagatctaatgttgcagtccgcaaggagttacacactccagcatcagatcgctcatgtactcatcttgatttcgatatcgctggcaccggattgagctacgggactggagatcatgtaggtgtctattgtgataatttatctgaaaccgtcgaggaagctgagaggttgcttaatctgccgcctgaaacgtattttagcctccacgctgataaggaagacggcacacctttggcaggatcttctttgcctcctccctttccaccttgtacattacggactgctttgactaggtatgcggatttgctgaacacccccaaaaagagcgctttgctggccttagctgcatatgcttccgatcctaatgaagccgatagactaaaatacctagccagtcccgctggcaaggacgagtacgcacaatctcttgtcgctaaccaaagatcgcttttagaggtaatggccgagtttccctctgcaaaaccaccacttggggtttttttcgcggctattgctcctcgtcttcaaccaaggttctattcaatttcctctagtccgcgtatggctcctagtagaatccatgttacatgtgcattagtctacgaaaagactccaggtggtagaattcataagggagtttgttctacttggatgaaaaatgctattccgctggaagaatcacgtgactgctcgtgggcccccatctttgtacgtcaaagtaattttaagcttcctgcagaccctaaggtgccagtgataatgataggtccaggtaccggcttggctcctttcagaggattcttacaggaaaggttagctttgaaggaagaaggcgcagaattgggtactgctgtgttcttctttggttgtcgtaacagaaaaatggactacatttacgaagatgagctaaaccatttcttagaaattggtgccttgtccgaactattagtcgccttcagcagggagggccctacgaagcaatacgttcagcataaaatggctgaaaaagcgtcagacatttggcgaatgataagtgatggtgcctatgtgtatgtgtgcggggatgcaaagggtatggctcgtgatgtccacagaacactacatactatcgcccaagagcaaggctcgatggattctacacaagctgaaggttttgtaaagaatctacaaatgacgggtaggtacctaagagatgtttggggtggcggctctggcggaagcacatctagcggtagttccggtggtatggcgtccgatcaaaaattacataaatttgatgaagtatccaagcacaataagactaaagattgttggttaattattaatggtaaagtatacgatgtcactccatttatggatgatcatcctggcggtgacgaggttttgctgtctgcaactggcaaggatgcaactaacgactttgaagatgttggtcattcagactctgctagagaaatgatggacaagtattacattggggaaatggatatggcaaccgttccactaaaaagaacttacattccccctcaacaggcgcaatataatccagacaaaacaccagaatttgtgattaaaattctgcaatttttggttccattattgattttgggtcttgcatttgcggtacgtcattacaccaaagaaaaa

SEQ ID NO: 1471 - DNA, 3837 bp, Artificial Sequence
  G8H-CPR-CYB5 engineered fusion
atggattttctgacaattttcattggtcctcttctggcaatcattgcattgttctacgctcgcttaacaattagcactcgtggaaagaatctacccccaggtcccactcctttaccatttattggtaatttacacttgctcggtcatcatccccataagtctttggcacgtcttgccaagacttatggtccattgatgttacttagactagggtctgaaaatactgtggtcgtatcttcggctgccgttgctaaagaagtattgcaaaaacatgatttggcctttagttctcgatccatacctgatgcagttcatgcacacgatcaattcaagtactccgtggtttggttgccagttgcctctagatggagatctttaagaaaaactatgaactccaatatcttttcgggctcctgcttagatgccaatcagcatttaagaagtaggaaggttgaagaattaatcgcctattgtaaagaaagctgtaggcgtgctgaagcagtagacgtcgggcgtgctgctttcagaaccgctttaaattctttgtcaaacacaattttttctcgagaccttgctgatccattatccgactctggtaaggaatttaaggacgttgtttcttcgatcatgatggaggcgggcaagccaaacagtgtagactactatccgttcctgtctcgattcgatccccaaggaatccgtagaaggaccgcaatctattttgataaactgattaacatcttcaagggtttgattgacgaacgtctcgaaaaaagaaggtcgcagtacgaagaggctacggatgtaatcgatatattacttaacactattgaacagaacccagaagaaatcgaccgaactcatatcgagagaatgttcttagatctctttttggctggtacagatacgacatcttcgacggtcgaatgggccatggctgaagccatgaagaacccagaaaccatgaagaaagctaaggcggaattagctcaagttatcggcaaggggaaaatagtccaagaaactgatataccacacctaccatatttgcaatgcatcgtaaaggagacactacgattacacccacctgtacccttccttatcccacgtcgtgttcatgaagacgtggacatattgggttatgtcgttccaaataactcacaagtgttcgttaacatgtgggccattgggagggacccagatatgtggaaaaatccattacaatttgatcccgaccgttttcatgattccgaagtcggtctgagaggtaaagattttgaattgattcccttcggcgctggcagaagaatttgcccaggattacctttggctatgcgtatggtgcctgttgttttaggatctctcttgaactccttcgattggaaggtcgaaggtggtaaagaactggaaatgaatgaaaagtttggaataactcttgaaaaagcacaacctttaatggcagtacccatcgcattaggtggcggctctggcggaagcacatctagcggtagttccggtggttggagacggtcctccggatctggtaaaaaggttgttgaaccacctaaactaatcgtgccaaaaagtgttgtcgaaccagaggaaatcgatgaaggtaagaaaaagtttactatattttttggcacccagacaggtacggctgagggcttcgcaaaggcactagccgaggaagctaaagctaggtatgaaaaggcagtcattaaggttatcgatatagacgattatgcggctgatgacgaggaatatgaagaaaaatttaggaaggaaacgttagcttttttcattctggctacttacggcgatggtgaaccaacagacaatgcagccagattctacaagtggtttgttgaagggaatgacaggggtgattggttaaaaaatttgcaatacggtgtttttggcctcgggaatcgccagtacgaacatttcaataagatagccaaagtggtagatgagaaggttgcggaacaaggtggcaaacgtatcgtccccttagttttaggcgatgacgatcagtgtattgaagacgatttcgcggcatggcgtgaaaatgtttggcccgaacttgataatcttcttagagacgaagacgatactactgtttcaacaacctacacggccgcaatccccgaatacagagttgttttcccagataagtcagatagcttaatttcagaagcaaatggtcacgctaatggttatgctaatgggaatacggtctacgatgctcaacacccatgcagatctaatgttgcagtccgcaaggagttacacactccagcatcagatcgctcatgtactcatcttgatttcgatatcgctggcaccggattgagctacgggactggagatcatgtaggtgtctattgtgataatttatctgaaaccgtcgaggaagctgagaggttgcttaatctgccgcctgaaacgtattttagcctccacgctgataaggaagacggcacacctttggcaggatcttctttgcctcctccctttccaccttgtacattacggactgctttgactaggtatgcggatttgctgaacacccccaaaaagagcgctttgctggccttagctgcatatgcttccgatcctaatgaagccgatagactaaaatacctagccagtcccgctggcaaggacgagtacgcacaatctcttgtcgctaaccaaagatcgcttttagaggtaatggccgagtttccctctgcaaaaccaccacttggggtttttttcgcggctattgctcctcgtcttcaaccaaggttctattcaatttcctctagtccgcgtatggctcctagtagaatccatgttacatgtgcattagtctacgaaaagactccaggtggtagaattcataagggagtttgttctacttggatgaaaaatgctattccgctggaagaatcacgtgactgctcgtgggcccccatctttgtacgtcaaagtaattttaagcttcctgcagaccctaaggtgccagtgataatgataggtccaggtaccggcttggctcctttcagaggattcttacaggaaaggttagctttgaaggaagaaggcgcagaattgggtactgctgtgttcttctttggttgtcgtaacagaaaaatggactacatttacgaagatgagctaaaccatttcttagaaattggtgccttgtccgaactattagtcgccttcagcagggagggccctacgaagcaatacgttcagcataaaatggctgaaaaagcgtcagacatttggcgaatgataagtgatggtgcctatgtgtatgtgtgcggggatgcaaagggtatggctcgtgatgtccacagaacactacatactatcgcccaagagcaaggctcgatggattctacacaagctgaaggttttgtaaagaatctacaaatgacgggtaggtacctaagagatgtttggggtggcggctctggcggaagcacatctagcggtagttccggtggtatggcgtccgatcaaaaattacataaatttgatgaagtatccaagcacaataagactaaagattgttggttaattattaatggtaaagtatacgatgtcactccatttatggatgatcatcctggcggtgacgaggttttgctgtctgcaactggcaaggatgcaactaacgactttgaagatgttggtcattcagactctgctagagaaatgatggacaagtattacattggggaaatggatatggcaaccgttccactaaaaagaacttacattccccctcaacaggcgcaatataatccagacaaaacaccagaatacaccaaagaaaaa

SEQ ID NO: 1472 - DNA, 3822 bp, Artificial Sequence
  G8H-CPR-CYB5 engineered fusion
atggattttctgacaattttcattggtcctcttctggcaatcattgcattgttctacgctcgcttaacaattagcactcgtggaaagaatctacccccaggtcccactcctttaccatttattggtaatttacacttgctcggtcatcatccccataagtctttggcacgtcttgccaagacttatggtccattgatgttacttagactagggtctgaaaatactgtggtcgtatcttcggctgccgttgctaaagaagtattgcaaaaacatgatttggcctttagttctcgatccatacctgatgcagttcatgcacacgatcaattcaagtactccgtggtttggttgccagttgcctctagatggagatctttaagaaaaactatgaactccaatatcttttcgggctcctgcttagatgccaatcagcatttaagaagtaggaaggttgaagaattaatcgcctattgtaaagaaagctgtaggcgtgctgaagcagtagacgtcgggcgtgctgctttcagaaccgctttaaattctttgtcaaacacaattttttctcgagaccttgctgatccattatccgactctggtaaggaatttaaggacgttgtttcttcgatcatgatggaggcgggcaagccaaacagtgtagactactatccgttcctgtctcgattcgatccccaaggaatccgtagaaggaccgcaatctattttgataaactgattaacatcttcaagggtttgattgacgaacgtctcgaaaaaagaaggtcgcagtacgaagaggctacggatgtaatcgatatattacttaacactattgaacagaacccagaagaaatcgaccgaactcatatcgagagaatgttcttagatctctttttggctggtacagatacgacatcttcgacggtcgaatgggccatggctgaagccatgaagaacccagaaaccatgaagaaagctaaggcggaattagctcaagttatcggcaaggggaaaatagtccaagaaactgatataccacacctaccatatttgcaatgcatcgtaaaggagacactacgattacacccacctgtacccttccttatcccacgtcgtgttcatgaagacgtggacatattgggttatgtcgttccaaataactcacaagtgttcgttaacatgtgggccattgggagggacccagatatgtggaaaaatccattacaatttgatcccgaccgttttcatgattccgaagtcggtctgagaggtaaagattttgaattgattcccttcggcgctggcagaagaatttgcccaggattacctttggctatgcgtatggtgcctgttgttttaggatctctcttgaactccttcgattggaaggtcgaaggtggtaaagaactggaaatgaatgaaaagtttggaataactcttgaaaaagcacaacctttaatggcagtacccatcgcattaggtggcggctctggcggaagcacatctagcggtagttccggtggttggagacggtcctccggatctggtaaaaaggttgttgaaccacctaaactaatcgtgccaaaaagtgttgtcgaaccagaggaaatcgatgaaggtaagaaaaagtttactatattttttggcacccagacaggtacggctgagggcttcgcaaaggcactagccgaggaagctaaagctaggtatgaaaaggcagtcattaaggttatcgatatagacgattatgcggctgatgacgaggaatatgaagaaaaatttaggaaggaaacgttagcttttttcattctggctacttacggcgatggtgaaccaacagacaatgcagccagattctacaagtggtttgttgaagggaatgacaggggtgattggttaaaaaatttgcaatacggtgtttttggcctcgggaatcgccagtacgaacatttcaataagatagccaaagtggtagatgagaaggttgcggaacaaggtggcaaacgtatcgtccccttagttttaggcgatgacgatcagtgtattgaagacgatttcgcggcatggcgtgaaaatgtttggcccgaacttgataatcttcttagagacgaagacgatactactgtttcaacaacctacacggccgcaatccccgaatacagagttgttttcccagataagtcagatagcttaatttcagaagcaaatggtcacgctaatggttatgctaatgggaatacggtctacgatgctcaacacccatgcagatctaatgttgcagtccgcaaggagttacacactccagcatcagatcgctcatgtactcatcttgatttcgatatcgctggcaccggattgagctacgggactggagatcatgtaggtgtctattgtgataatttatctgaaaccgtcgaggaagctgagaggttgcttaatctgccgcctgaaacgtattttagcctccacgctgataaggaagacggcacacctttggcaggatcttctttgcctcctccctttccaccttgtacattacggactgctttgactaggtatgcggatttgctgaacacccccaaaaagagcgctttgctggccttagctgcatatgcttccgatcctaatgaagccgatagactaaaatacctagccagtcccgctggcaaggacgagtacgcacaatctcttgtcgctaaccaaagatcgcttttagaggtaatggccgagtttccctctgcaaaaccaccacttggggtttttttcgcggctattgctcctcgtcttcaaccaaggttctattcaatttcctctagtccgcgtatggctcctagtagaatccatgttacatgtgcattagtctacgaaaagactccaggtggtagaattcataagggagtttgttctacttggatgaaaaatgctattccgctggaagaatcacgtgactgctcgtgggcccccatctttgtacgtcaaagtaattttaagcttcctgcagaccctaaggtgccagtgataatgataggtccaggtaccggcttggctcctttcagaggattcttacaggaaaggttagctttgaaggaagaaggcgcagaattgggtactgctgtgttcttctttggttgtcgtaacagaaaaatggactacatttacgaagatgagctaaaccatttcttagaaattggtgccttgtccgaactattagtcgccttcagcagggagggccctacgaagcaatacgttcagcataaaatggctgaaaaagcgtcagacatttggcgaatgataagtgatggtgcctatgtgtatgtgtgcggggatgcaaagggtatggctcgtgatgtccacagaacactacatactatcgcccaagagcaaggctcgatggattctacacaagctgaaggttttgtaaagaatctacaaatgacgggtaggtacctaagagatgtttggggtggcggctctggcggaagcacatctagcggtagttccggtggtatggcgtccgatcaaaaattacataaatttgatgaagtatccaagcacaataagactaaagattgttggttaattattaatggtaaagtatacgatgtcactccatttatggatgatcatcctggcggtgacgaggttttgctgtctgcaactggcaaggatgcaactaacgactttgaagatgttggtcattcagactctgctagagaaatgatggacaagtattacattggggaaatggatatggcaaccgttccactaaaaagaacttacattccccctcaacaggcgcaatataatccagacaaaacaccagaa

SEQ ID NO: 1473 - DNA, 3918 bp, Artificial Sequence
  G8H-CPR-CYB5 engineered fusion
atggattttctgacaattttcattggtcctcttctggcaatcattgcattgttctacgctcgcttaacaattagcactcgtggaaagaatctacccccaggtcccactcctttaccatttattggtaatttacacttgctcggtcatcatccccataagtctttggcacgtcttgccaagacttatggtccattgatgttacttagactagggtctgaaaatactgtggtcgtatcttcggctgccgttgctaaagaagtattgcaaaaacatgatttggcctttagttctcgatccatacctgatgcagttcatgcacacgatcaattcaagtactccgtggtttggttgccagttgcctctagatggagatctttaagaaaaactatgaactccaatatcttttcgggctcctgcttagatgccaatcagcatttaagaagtaggaaggttgaagaattaatcgcctattgtaaagaaagctgtaggcgtgctgaagcagtagacgtcgggcgtgctgctttcagaaccgctttaaattctttgtcaaacacaattttttctcgagaccttgctgatccattatccgactctggtaaggaatttaaggacgttgtttcttcgatcatgatggaggcgggcaagccaaacagtgtagactactatccgttcctgtctcgattcgatccccaaggaatccgtagaaggaccgcaatctattttgataaactgattaacatcttcaagggtttgattgacgaacgtctcgaaaaaagaaggtcgcagtacgaagaggctacggatgtaatcgatatattacttaacactattgaacagaacccagaagaaatcgaccgaactcatatcgagagaatgttcttagatctctttttggctggtacagatacgacatcttcgacggtcgaatgggccatggctgaagccatgaagaacccagaaaccatgaagaaagctaaggcggaattagctcaagttatcggcaaggggaaaatagtccaagaaactgatataccacacctaccatatttgcaatgcatcgtaaaggagacactacgattacacccacctgtacccttccttatcccacgtcgtgttcatgaagacgtggacatattgggttatgtcgttccaaataactcacaagtgttcgttaacatgtgggccattgggagggacccagatatgtggaaaaatccattacaatttgatcccgaccgttttcatgattccgaagtcggtctgagaggtaaagattttgaattgattcccttcggcgctggcagaagaatttgcccaggattacctttggctatgcgtatggtgcctgttgttttaggatctctcttgaactccttcgattggaaggtcgaaggtggtaaagaactggaaatgaatgaaaagtttggaataactcttgaaaaagcacaacctttaatggcagtacccatcgcattaggtggcggctctggcggaagcacatctagcggtagttccggtggttggagacggtcctccggatctggtaaaaaggttgttgaaccacctaaactaatcgtgccaaaaagtgttgtcgaaccagaggaaatcgatgaaggtaagaaaaagtttactatattttttggcacccagacaggtacggctgagggcttcgcaaaggcactagccgaggaagctaaagctaggtatgaaaaggcagtcattaaggttatcgatatagacgattatgcggctgatgacgaggaatatgaagaaaaatttaggaaggaaacgttagcttttttcattctggctacttacggcgatggtgaaccaacagacaatgcagccagattctacaagtggtttgttgaagggaatgacaggggtgattggttaaaaaatttgcaatacggtgtttttggcctcgggaatcgccagtacgaacatttcaataagatagccaaagtggtagatgagaaggttgcggaacaaggtggcaaacgtatcgtccccttagttttaggcgatgacgatcagtgtattgaagacgatttcgcggcatggcgtgaaaatgtttggcccgaacttgataatcttcttagagacgaagacgatactactgtttcaacaacctacacggccgcaatccccgaatacagagttgttttcccagataagtcagatagcttaatttcagaagcaaatggtcacgctaatggttatgctaatgggaatacggtctacgatgctcaacacccatgcagatctaatgttgcagtccgcaaggagttacacactccagcatcagatcgctcatgtactcatcttgatttcgatatcgctggcaccggattgagctacgggactggagatcatgtaggtgtctattgtgataatttatctgaaaccgtcgaggaagctgagaggttgcttaatctgccgcctgaaacgtattttagcctccacgctgataaggaagacggcacacctttggcaggatcttctttgcctcctccctttccaccttgtacattacggactgctttgactaggtatgcggatttgctgaacacccccaaaaagagcgctttgctggccttagctgcatatgcttccgatcctaatgaagccgatagactaaaatacctagccagtcccgctggcaaggacgagtacgcacaatctcttgtcgctaaccaaagatcgcttttagaggtaatggccgagtttccctctgcaaaaccaccacttggggtttttttcgcggctattgctcctcgtcttcaaccaaggttctattcaatttcctctagtccgcgtatggctcctagtagaatccatgttacatgtgcattagtctacgaaaagactccaggtggtagaattcataagggagtttgttctacttggatgaaaaatgctattccgctggaagaatcacgtgactgctcgtgggcccccatctttgtacgtcaaagtaattttaagcttcctgcagaccctaaggtgccagtgataatgataggtccaggtaccggcttggctcctttcagaggattcttacaggaaaggttagctttgaaggaagaaggcgcagaattgggtactgctgtgttcttctttggttgtcgtaacagaaaaatggactacatttacgaagatgagctaaaccatttcttagaaattggtgccttgtccgaactattagtcgccttcagcagggagggccctacgaagcaatacgttcagcataaaatggctgaaaaagcgtcagacatttggcgaatgataagtgatggtgcctatgtgtatgtgtgcggggatgcaaagggtatggctcgtgatgtccacagaacactacatactatcgcccaagagcaaggctcgatggattctacacaagctgaaggttttgtaaagaatctacaaatgacgggtaggtacctaagagatgtttggggtggcggctctggcggaagcacatctagcggtagttccggtggtatgccgacattaactaagttatacacaatggaagaagcttctcaacataatacaaacgaagactgttggatagtcatagatggtaaagtctatgacgtcagctcttatgtcgatgatcatcctggcggtgatgacatactagttggagcaacaggtaaagatgctacagatgaattcgaagatgctggtcattctaaaagcgcaagagaattaatggagaaattttgtattggggaattagaagaaaccacaccaagtattccagaattggatatcgtctcacaaaagcaaaagatgaacgatcttccacataagatcttgaattttactaaacaatattggttcgcatcaattactgtggcaggtttgtccgtggtcgttgggtatctttgcatccgaaaaaagcaaacaact

SEQ ID NO: 1474 - DNA, 3858 bp, Artificial Sequence
  G8H-CPR-CYB5 engineered fusion
atggattttctgacaattttcattggtcctcttctggcaatcattgcattgttctacgctcgcttaacaattagcactcgtggaaagaatctacccccaggtcccactcctttaccatttattggtaatttacacttgctcggtcatcatccccataagtctttggcacgtcttgccaagacttatggtccattgatgttacttagactagggtctgaaaatactgtggtcgtatcttcggctgccgttgctaaagaagtattgcaaaaacatgatttggcctttagttctcgatccatacctgatgcagttcatgcacacgatcaattcaagtactccgtggtttggttgccagttgcctctagatggagatctttaagaaaaactatgaactccaatatcttttcgggctcctgcttagatgccaatcagcatttaagaagtaggaaggttgaagaattaatcgcctattgtaaagaaagctgtaggcgtgctgaagcagtagacgtcgggcgtgctgctttcagaaccgctttaaattctttgtcaaacacaattttttctcgagaccttgctgatccattatccgactctggtaaggaatttaaggacgttgtttcttcgatcatgatggaggcgggcaagccaaacagtgtagactactatccgttcctgtctcgattcgatccccaaggaatccgtagaaggaccgcaatctattttgataaactgattaacatcttcaagggtttgattgacgaacgtctcgaaaaaagaaggtcgcagtacgaagaggctacggatgtaatcgatatattacttaacactattgaacagaacccagaagaaatcgaccgaactcatatcgagagaatgttcttagatctctttttggctggtacagatacgacatcttcgacggtcgaatgggccatggctgaagccatgaagaacccagaaaccatgaagaaagctaaggcggaattagctcaagttatcggcaaggggaaaatagtccaagaaactgatataccacacctaccatatttgcaatgcatcgtaaaggagacactacgattacacccacctgtacccttccttatcccacgtcgtgttcatgaagacgtggacatattgggttatgtcgttccaaataactcacaagtgttcgttaacatgtgggccattgggagggacccagatatgtggaaaaatccattacaatttgatcccgaccgttttcatgattccgaagtcggtctgagaggtaaagattttgaattgattcccttcggcgctggcagaagaatttgcccaggattacctttggctatgcgtatggtgcctgttgttttaggatctctcttgaactccttcgattggaaggtcgaaggtggtaaagaactggaaatgaatgaaaagtttggaataactcttgaaaaagcacaacctttaatggcagtacccatcgcattaggtggcggctctggcggaagcacatctagcggtagttccggtggttggagacggtcctccggatctggtaaaaaggttgttgaaccacctaaactaatcgtgccaaaaagtgttgtcgaaccagaggaaatcgatgaaggtaagaaaaagtttactatattttttggcacccagacaggtacggctgagggcttcgcaaaggcactagccgaggaagctaaagctaggtatgaaaaggcagtcattaaggttatcgatatagacgattatgcggctgatgacgaggaatatgaagaaaaatttaggaaggaaacgttagcttttttcattctggctacttacggcgatggtgaaccaacagacaatgcagccagattctacaagtggtttgttgaagggaatgacaggggtgattggttaaaaaatttgcaatacggtgtttttggcctcgggaatcgccagtacgaacatttcaataagatagccaaagtggtagatgagaaggttgcggaacaaggtggcaaacgtatcgtccccttagttttaggcgatgacgatcagtgtattgaagacgatttcgcggcatggcgtgaaaatgtttggcccgaacttgataatcttcttagagacgaagacgatactactgtttcaacaacctacacggccgcaatccccgaatacagagttgttttcccagataagtcagatagcttaatttcagaagcaaatggtcacgctaatggttatgctaatgggaatacggtctacgatgctcaacacccatgcagatctaatgttgcagtccgcaaggagttacacactccagcatcagatcgctcatgtactcatcttgatttcgatatcgctggcaccggattgagctacgggactggagatcatgtaggtgtctattgtgataatttatctgaaaccgtcgaggaagctgagaggttgcttaatctgccgcctgaaacgtattttagcctccacgctgataaggaagacggcacacctttggcaggatcttctttgcctcctccctttccaccttgtacattacggactgctttgactaggtatgcggatttgctgaacacccccaaaaagagcgctttgctggccttagctgcatatgcttccgatcctaatgaagccgatagactaaaatacctagccagtcccgctggcaaggacgagtacgcacaatctcttgtcgctaaccaaagatcgcttttagaggtaatggccgagtttccctctgcaaaaccaccacttggggtttttttcgcggctattgctcctcgtcttcaaccaaggttctattcaatttcctctagtccgcgtatggctcctagtagaatccatgttacatgtgcattagtctacgaaaagactccaggtggtagaattcataagggagtttgttctacttggatgaaaaatgctattccgctggaagaatcacgtgactgctcgtgggcccccatctttgtacgtcaaagtaattttaagcttcctgcagaccctaaggtgccagtgataatgataggtccaggtaccggcttggctcctttcagaggattcttacaggaaaggttagctttgaaggaagaaggcgcagaattgggtactgctgtgttcttctttggttgtcgtaacagaaaaatggactacatttacgaagatgagctaaaccatttcttagaaattggtgccttgtccgaactattagtcgccttcagcagggagggccctacgaagcaatacgttcagcataaaatggctgaaaaagcgtcagacatttggcgaatgataagtgatggtgcctatgtgtatgtgtgcggggatgcaaagggtatggctcgtgatgtccacagaacactacatactatcgcccaagagcaaggctcgatggattctacacaagctgaaggttttgtaaagaatctacaaatgacgggtaggtacctaagagatgtttggggtggcggctctggcggaagcacatctagcggtagttccggtggtatgccgacattaactaagttatacacaatggaagaagcttctcaacataatacaaacgaagactgttggatagtcatagatggtaaagtctatgacgtcagctcttatgtcgatgatcatcctggcggtgatgacatactagttggagcaacaggtaaagatgctacagatgaattcgaagatgctggtcattctaaaagcgcaagagaattaatggagaaattttgtattggggaattagaagaaaccacaccaagtattccagaattggatatcgtctcacaaaagcaaaagatgaacgatcttccacataagatcttgaattttactaaacaacgaaaaaagcaaacaact

SEQ ID NO: 1475 - DNA, 3840 bp, Artificial Sequence
  G8H-CPR-CYB5 engineered fusion
atggattttctgacaattttcattggtcctcttctggcaatcattgcattgttctacgctcgcttaacaattagcactcgtggaaagaatctacccccaggtcccactcctttaccatttattggtaatttacacttgctcggtcatcatccccataagtctttggcacgtcttgccaagacttatggtccattgatgttacttagactagggtctgaaaatactgtggtcgtatcttcggctgccgttgctaaagaagtattgcaaaaacatgatttggcctttagttctcgatccatacctgatgcagttcatgcacacgatcaattcaagtactccgtggtttggttgccagttgcctctagatggagatctttaagaaaaactatgaactccaatatcttttcgggctcctgcttagatgccaatcagcatttaagaagtaggaaggttgaagaattaatcgcctattgtaaagaaagctgtaggcgtgctgaagcagtagacgtcgggcgtgctgctttcagaaccgctttaaattctttgtcaaacacaattttttctcgagaccttgctgatccattatccgactctggtaaggaatttaaggacgttgtttcttcgatcatgatggaggcgggcaagccaaacagtgtagactactatccgttcctgtctcgattcgatccccaaggaatccgtagaaggaccgcaatctattttgataaactgattaacatcttcaagggtttgattgacgaacgtctcgaaaaaagaaggtcgcagtacgaagaggctacggatgtaatcgatatattacttaacactattgaacagaacccagaagaaatcgaccgaactcatatcgagagaatgttcttagatctctttttggctggtacagatacgacatcttcgacggtcgaatgggccatggctgaagccatgaagaacccagaaaccatgaagaaagctaaggcggaattagctcaagttatcggcaaggggaaaatagtccaagaaactgatataccacacctaccatatttgcaatgcatcgtaaaggagacactacgattacacccacctgtacccttccttatcccacgtcgtgttcatgaagacgtggacatattgggttatgtcgttccaaataactcacaagtgttcgttaacatgtgggccattgggagggacccagatatgtggaaaaatccattacaatttgatcccgaccgttttcatgattccgaagtcggtctgagaggtaaagattttgaattgattcccttcggcgctggcagaagaatttgcccaggattacctttggctatgcgtatggtgcctgttgttttaggatctctcttgaactccttcgattggaaggtcgaaggtggtaaagaactggaaatgaatgaaaagtttggaataactcttgaaaaagcacaacctttaatggcagtacccatcgcattaggtggcggctctggcggaagcacatctagcggtagttccggtggttggagacggtcctccggatctggtaaaaaggttgttgaaccacctaaactaatcgtgccaaaaagtgttgtcgaaccagaggaaatcgatgaaggtaagaaaaagtttactatattttttggcacccagacaggtacggctgagggcttcgcaaaggcactagccgaggaagctaaagctaggtatgaaaaggcagtcattaaggttatcgatatagacgattatgcggctgatgacgaggaatatgaagaaaaatttaggaaggaaacgttagcttttttcattctggctacttacggcgatggtgaaccaacagacaatgcagccagattctacaagtggtttgttgaagggaatgacaggggtgattggttaaaaaatttgcaatacggtgtttttggcctcgggaatcgccagtacgaacatttcaataagatagccaaagtggtagatgagaaggttgcggaacaaggtggcaaacgtatcgtccccttagttttaggcgatgacgatcagtgtattgaagacgatttcgcggcatggcgtgaaaatgtttggcccgaacttgataatcttcttagagacgaagacgatactactgtttcaacaacctacacggccgcaatccccgaatacagagttgttttcccagataagtcagatagcttaatttcagaagcaaatggtcacgctaatggttatgctaatgggaatacggtctacgatgctcaacacccatgcagatctaatgttgcagtccgcaaggagttacacactccagcatcagatcgctcatgtactcatcttgatttcgatatcgctggcaccggattgagctacgggactggagatcatgtaggtgtctattgtgataatttatctgaaaccgtcgaggaagctgagaggttgcttaatctgccgcctgaaacgtattttagcctccacgctgataaggaagacggcacacctttggcaggatcttctttgcctcctccctttccaccttgtacattacggactgctttgactaggtatgcggatttgctgaacacccccaaaaagagcgctttgctggccttagctgcatatgcttccgatcctaatgaagccgatagactaaaatacctagccagtcccgctggcaaggacgagtacgcacaatctcttgtcgctaaccaaagatcgcttttagaggtaatggccgagtttccctctgcaaaaccaccacttggggtttttttcgcggctattgctcctcgtcttcaaccaaggttctattcaatttcctctagtccgcgtatggctcctagtagaatccatgttacatgtgcattagtctacgaaaagactccaggtggtagaattcataagggagtttgttctacttggatgaaaaatgctattccgctggaagaatcacgtgactgctcgtgggcccccatctttgtacgtcaaagtaattttaagcttcctgcagaccctaaggtgccagtgataatgataggtccaggtaccggcttggctcctttcagaggattcttacaggaaaggttagctttgaaggaagaaggcgcagaattgggtactgctgtgttcttctttggttgtcgtaacagaaaaatggactacatttacgaagatgagctaaaccatttcttagaaattggtgccttgtccgaactattagtcgccttcagcagggagggccctacgaagcaatacgttcagcataaaatggctgaaaaagcgtcagacatttggcgaatgataagtgatggtgcctatgtgtatgtgtgcggggatgcaaagggtatggctcgtgatgtccacagaacactacatactatcgcccaagagcaaggctcgatggattctacacaagctgaaggttttgtaaagaatctacaaatgacgggtaggtacctaagagatgtttggggtggcggctctggcggaagcacatctagcggtagttccggtggtatgccgacattaactaagttatacacaatggaagaagcttctcaacataatacaaacgaagactgttggatagtcatagatggtaaagtctatgacgtcagctcttatgtcgatgatcatcctggcggtgatgacatactagttggagcaacaggtaaagatgctacagatgaattcgaagatgctggtcattctaaaagcgcaagagaattaatggagaaattttgtattggggaattagaagaaaccacaccaagtattccagaattggatatcgtctcacaaaagcaaaagatgaacgatcttccacataagatcttgaattttactaaacaa

SEQ ID NO: 1476 - DNA, 3861 bp, Artificial Sequence
  G8H-CPR-CYB5 engineered fusion
atggattttctgacaattttcattggtcctcttctggcaatcattgcattgttctacgctcgcttaacaattagcactcgtggaaagaatctacccccaggtcccactcctttaccatttattggtaatttacacttgctcggtcatcatccccataagtctttggcacgtcttgccaagacttatggtccattgatgttacttagactagggtctgaaaatactgtggtcgtatcttcggctgccgttgctaaagaagtattgcaaaaacatgatttggcctttagttctcgatccatacctgatgcagttcatgcacacgatcaattcaagtactccgtggtttggttgccagttgcctctagatggagatctttaagaaaaactatgaactccaatatcttttcgggctcctgcttagatgccaatcagcatttaagaagtaggaaggttgaagaattaatcgcctattgtaaagaaagctgtaggcgtgctgaagcagtagacgtcgggcgtgctgctttcagaaccgctttaaattctttgtcaaacacaattttttctcgagaccttgctgatccattatccgactctggtaaggaatttaaggacgttgtttcttcgatcatgatggaggcgggcaagccaaacagtgtagactactatccgttcctgtctcgattcgatccccaaggaatccgtagaaggaccgcaatctattttgataaactgattaacatcttcaagggtttgattgacgaacgtctcgaaaaaagaaggtcgcagtacgaagaggctacggatgtaatcgatatattacttaacactattgaacagaacccagaagaaatcgaccgaactcatatcgagagaatgttcttagatctctttttggctggtacagatacgacatcttcgacggtcgaatgggccatggctgaagccatgaagaacccagaaaccatgaagaaagctaaggcggaattagctcaagttatcggcaaggggaaaatagtccaagaaactgatataccacacctaccatatttgcaatgcatcgtaaaggagacactacgattacacccacctgtacccttccttatcccacgtcgtgttcatgaagacgtggacatattgggttatgtcgttccaaataactcacaagtgttcgttaacatgtgggccattgggagggacccagatatgtggaaaaatccattacaatttgatcccgaccgttttcatgattccgaagtcggtctgagaggtaaagattttgaattgattcccttcggcgctggcagaagaatttgcccaggattacctttggctatgcgtatggtgcctgttgttttaggatctctcttgaactccttcgattggaaggtcgaaggtggtaaagaactggaaatgaatgaaaagtttggaataactcttgaaaaagcacaacctttaatggcagtacccatcgcattaggtggcggctctggcggaagcacatctagcggtagttccggtggttggagacggtcctccggatctggtaaaaaggttgttgaaccacctaaactaatcgtgccaaaaagtgttgtcgaaccagaggaaatcgatgaaggtaagaaaaagtttactatattttttggcacccagacaggtacggctgagggcttcgcaaaggcactagccgaggaagctaaagctaggtatgaaaaggcagtcattaaggttatcgatatagacgattatgcggctgatgacgaggaatatgaagaaaaatttaggaaggaaacgttagcttttttcattctggctacttacggcgatggtgaaccaacagacaatgcagccagattctacaagtggtttgttgaagggaatgacaggggtgattggttaaaaaatttgcaatacggtgtttttggcctcgggaatcgccagtacgaacatttcaataagatagccaaagtggtagatgagaaggttgcggaacaaggtggcaaacgtatcgtccccttagttttaggcgatgacgatcagtgtattgaagacgatttcgcggcatggcgtgaaaatgtttggcccgaacttgataatcttcttagagacgaagacgatactactgtttcaacaacctacacggccgcaatccccgaatacagagttgttttcccagataagtcagatagcttaatttcagaagcaaatggtcacgctaatggttatgctaatgggaatacggtctacgatgctcaacacccatgcagatctaatgttgcagtccgcaaggagttacacactccagcatcagatcgctcatgtactcatcttgatttcgatatcgctggcaccggattgagctacgggactggagatcatgtaggtgtctattgtgataatttatctgaaaccgtcgaggaagctgagaggttgcttaatctgccgcctgaaacgtattttagcctccacgctgataaggaagacggcacacctttggcaggatcttctttgcctcctccctttccaccttgtacattacggactgctttgactaggtatgcggatttgctgaacacccccaaaaagagcgctttgctggccttagctgcatatgcttccgatcctaatgaagccgatagactaaaatacctagccagtcccgctggcaaggacgagtacgcacaatctcttgtcgctaaccaaagatcgcttttagaggtaatggccgagtttccctctgcaaaaccaccacttggggtttttttcgcggctattgctcctcgtcttcaaccaaggttctattcaatttcctctagtccgcgtatggctcctagtagaatccatgttacatgtgcattagtctacgaaaagactccaggtggtagaattcataagggagtttgttctacttggatgaaaaatgctattccgctggaagaatcacgtgactgctcgtgggcccccatctttgtacgtcaaagtaattttaagcttcctgcagaccctaaggtgccagtgataatgataggtccaggtaccggcttggctcctttcagaggattcttacaggaaaggttagctttgaaggaagaaggcgcagaattgggtactgctgtgttcttctttggttgtcgtaacagaaaaatggactacatttacgaagatgagctaaaccatttcttagaaattggtgccttgtccgaactattagtcgccttcagcagggagggccctacgaagcaatacgttcagcataaaatggctgaaaaagcgtcagacatttggcgaatgataagtgatggtgcctatgtgtatgtgtgcggggatgcaaagggtatggctcgtgatgtccacagaacactacatactatcgcccaagagcaaggctcgatggattctacacaagctgaaggttttgtaaagaatctacaaatgacgggtaggtacctaagagatgtttggatggcgtccgatcaaaaattacataaatttgatgaagtatccaagcacaataagactaaagattgttggttaattattaatggtaaagtatacgatgtcactccatttatggatgatcatcctggcggtgacgaggttttgctgtctgcaactggcaaggatgcaactaacgactttgaagatgttggtcattcagactctgctagagaaatgatggacaagtattacattggggaaatggatatggcaaccgttccactaaaaagaacttacattccccctcaacaggcgcaatataatccagacaaaacaccagaatttgtgattaaaattctgcaatttttggttccattattgattttgggtcttgcatttgcggtacgtcattacaccaaagaaaaa

SEQ ID NO: 1477 - DNA, 3792 bp, Artificial Sequence
  G8H-CPR-CYB5 engineered fusion
atggattttctgacaattttcattggtcctcttctggcaatcattgcattgttctacgctcgcttaacaattagcactcgtggaaagaatctacccccaggtcccactcctttaccatttattggtaatttacacttgctcggtcatcatccccataagtctttggcacgtcttgccaagacttatggtccattgatgttacttagactagggtctgaaaatactgtggtcgtatcttcggctgccgttgctaaagaagtattgcaaaaacatgatttggcctttagttctcgatccatacctgatgcagttcatgcacacgatcaattcaagtactccgtggtttggttgccagttgcctctagatggagatctttaagaaaaactatgaactccaatatcttttcgggctcctgcttagatgccaatcagcatttaagaagtaggaaggttgaagaattaatcgcctattgtaaagaaagctgtaggcgtgctgaagcagtagacgtcgggcgtgctgctttcagaaccgctttaaattctttgtcaaacacaattttttctcgagaccttgctgatccattatccgactctggtaaggaatttaaggacgttgtttcttcgatcatgatggaggcgggcaagccaaacagtgtagactactatccgttcctgtctcgattcgatccccaaggaatccgtagaaggaccgcaatctattttgataaactgattaacatcttcaagggtttgattgacgaacgtctcgaaaaaagaaggtcgcagtacgaagaggctacggatgtaatcgatatattacttaacactattgaacagaacccagaagaaatcgaccgaactcatatcgagagaatgttcttagatctctttttggctggtacagatacgacatcttcgacggtcgaatgggccatggctgaagccatgaagaacccagaaaccatgaagaaagctaaggcggaattagctcaagttatcggcaaggggaaaatagtccaagaaactgatataccacacctaccatatttgcaatgcatcgtaaaggagacactacgattacacccacctgtacccttccttatcccacgtcgtgttcatgaagacgtggacatattgggttatgtcgttccaaataactcacaagtgttcgttaacatgtgggccattgggagggacccagatatgtggaaaaatccattacaatttgatcccgaccgttttcatgattccgaagtcggtctgagaggtaaagattttgaattgattcccttcggcgctggcagaagaatttgcccaggattacctttggctatgcgtatggtgcctgttgttttaggatctctcttgaactccttcgattggaaggtcgaaggtggtaaagaactggaaatgaatgaaaagtttggaataactcttgaaaaagcacaacctttaatggcagtacccatcgcattaggtggcggctctggcggaagcacatctagcggtagttccggtggttggagacggtcctccggatctggtaaaaaggttgttgaaccacctaaactaatcgtgccaaaaagtgttgtcgaaccagaggaaatcgatgaaggtaagaaaaagtttactatattttttggcacccagacaggtacggctgagggcttcgcaaaggcactagccgaggaagctaaagctaggtatgaaaaggcagtcattaaggttatcgatatagacgattatgcggctgatgacgaggaatatgaagaaaaatttaggaaggaaacgttagcttttttcattctggctacttacggcgatggtgaaccaacagacaatgcagccagattctacaagtggtttgttgaagggaatgacaggggtgattggttaaaaaatttgcaatacggtgtttttggcctcgggaatcgccagtacgaacatttcaataagatagccaaagtggtagatgagaaggttgcggaacaaggtggcaaacgtatcgtccccttagttttaggcgatgacgatcagtgtattgaagacgatttcgcggcatggcgtgaaaatgtttggcccgaacttgataatcttcttagagacgaagacgatactactgtttcaacaacctacacggccgcaatccccgaatacagagttgttttcccagataagtcagatagcttaatttcagaagcaaatggtcacgctaatggttatgctaatgggaatacggtctacgatgctcaacacccatgcagatctaatgttgcagtccgcaaggagttacacactccagcatcagatcgctcatgtactcatcttgatttcgatatcgctggcaccggattgagctacgggactggagatcatgtaggtgtctattgtgataatttatctgaaaccgtcgaggaagctgagaggttgcttaatctgccgcctgaaacgtattttagcctccacgctgataaggaagacggcacacctttggcaggatcttctttgcctcctccctttccaccttgtacattacggactgctttgactaggtatgcggatttgctgaacacccccaaaaagagcgctttgctggccttagctgcatatgcttccgatcctaatgaagccgatagactaaaatacctagccagtcccgctggcaaggacgagtacgcacaatctcttgtcgctaaccaaagatcgcttttagaggtaatggccgagtttccctctgcaaaaccaccacttggggtttttttcgcggctattgctcctcgtcttcaaccaaggttctattcaatttcctctagtccgcgtatggctcctagtagaatccatgttacatgtgcattagtctacgaaaagactccaggtggtagaattcataagggagtttgttctacttggatgaaaaatgctattccgctggaagaatcacgtgactgctcgtgggcccccatctttgtacgtcaaagtaattttaagcttcctgcagaccctaaggtgccagtgataatgataggtccaggtaccggcttggctcctttcagaggattcttacaggaaaggttagctttgaaggaagaaggcgcagaattgggtactgctgtgttcttctttggttgtcgtaacagaaaaatggactacatttacgaagatgagctaaaccatttcttagaaattggtgccttgtccgaactattagtcgccttcagcagggagggccctacgaagcaatacgttcagcataaaatggctgaaaaagcgtcagacatttggcgaatgataagtgatggtgcctatgtgtatgtgtgcggggatgcaaagggtatggctcgtgatgtccacagaacactacatactatcgcccaagagcaaggctcgatggattctacacaagctgaaggttttgtaaagaatctacaaatgacgggtaggtacctaagagatgtttggatggcgtccgatcaaaaattacataaatttgatgaagtatccaagcacaataagactaaagattgttggttaattattaatggtaaagtatacgatgtcactccatttatggatgatcatcctggcggtgacgaggttttgctgtctgcaactggcaaggatgcaactaacgactttgaagatgttggtcattcagactctgctagagaaatgatggacaagtattacattggggaaatggatatggcaaccgttccactaaaaagaacttacattccccctcaacaggcgcaatataatccagacaaaacaccagaatacaccaaagaaaaa

SEQ ID NO: 1478 - DNA, 3777 bp, Artificial Sequence
  G8H-CPR-CYB5 engineered fusion
atggattttctgacaattttcattggtcctcttctggcaatcattgcattgttctacgctcgcttaacaattagcactcgtggaaagaatctacccccaggtcccactcctttaccatttattggtaatttacacttgctcggtcatcatccccataagtctttggcacgtcttgccaagacttatggtccattgatgttacttagactagggtctgaaaatactgtggtcgtatcttcggctgccgttgctaaagaagtattgcaaaaacatgatttggcctttagttctcgatccatacctgatgcagttcatgcacacgatcaattcaagtactccgtggtttggttgccagttgcctctagatggagatctttaagaaaaactatgaactccaatatcttttcgggctcctgcttagatgccaatcagcatttaagaagtaggaaggttgaagaattaatcgcctattgtaaagaaagctgtaggcgtgctgaagcagtagacgtcgggcgtgctgctttcagaaccgctttaaattctttgtcaaacacaattttttctcgagaccttgctgatccattatccgactctggtaaggaatttaaggacgttgtttcttcgatcatgatggaggcgggcaagccaaacagtgtagactactatccgttcctgtctcgattcgatccccaaggaatccgtagaaggaccgcaatctattttgataaactgattaacatcttcaagggtttgattgacgaacgtctcgaaaaaagaaggtcgcagtacgaagaggctacggatgtaatcgatatattacttaacactattgaacagaacccagaagaaatcgaccgaactcatatcgagagaatgttcttagatctctttttggctggtacagatacgacatcttcgacggtcgaatgggccatggctgaagccatgaagaacccagaaaccatgaagaaagctaaggcggaattagctcaagttatcggcaaggggaaaatagtccaagaaactgatataccacacctaccatatttgcaatgcatcgtaaaggagacactacgattacacccacctgtacccttccttatcccacgtcgtgttcatgaagacgtggacatattgggttatgtcgttccaaataactcacaagtgttcgttaacatgtgggccattgggagggacccagatatgtggaaaaatccattacaatttgatcccgaccgttttcatgattccgaagtcggtctgagaggtaaagattttgaattgattcccttcggcgctggcagaagaatttgcccaggattacctttggctatgcgtatggtgcctgttgttttaggatctctcttgaactccttcgattggaaggtcgaaggtggtaaagaactggaaatgaatgaaaagtttggaataactcttgaaaaagcacaacctttaatggcagtacccatcgcattaggtggcggctctggcggaagcacatctagcggtagttccggtggttggagacggtcctccggatctggtaaaaaggttgttgaaccacctaaactaatcgtgccaaaaagtgttgtcgaaccagaggaaatcgatgaaggtaagaaaaagtttactatattttttggcacccagacaggtacggctgagggcttcgcaaaggcactagccgaggaagctaaagctaggtatgaaaaggcagtcattaaggttatcgatatagacgattatgcggctgatgacgaggaatatgaagaaaaatttaggaaggaaacgttagcttttttcattctggctacttacggcgatggtgaaccaacagacaatgcagccagattctacaagtggtttgttgaagggaatgacaggggtgattggttaaaaaatttgcaatacggtgtttttggcctcgggaatcgccagtacgaacatttcaataagatagccaaagtggtagatgagaaggttgcggaacaaggtggcaaacgtatcgtccccttagttttaggcgatgacgatcagtgtattgaagacgatttcgcggcatggcgtgaaaatgtttggcccgaacttgataatcttcttagagacgaagacgatactactgtttcaacaacctacacggccgcaatccccgaatacagagttgttttcccagataagtcagatagcttaatttcagaagcaaatggtcacgctaatggttatgctaatgggaatacggtctacgatgctcaacacccatgcagatctaatgttgcagtccgcaaggagttacacactccagcatcagatcgctcatgtactcatcttgatttcgatatcgctggcaccggattgagctacgggactggagatcatgtaggtgtctattgtgataatttatctgaaaccgtcgaggaagctgagaggttgcttaatctgccgcctgaaacgtattttagcctccacgctgataaggaagacggcacacctttggcaggatcttctttgcctcctccctttccaccttgtacattacggactgctttgactaggtatgcggatttgctgaacacccccaaaaagagcgctttgctggccttagctgcatatgcttccgatcctaatgaagccgatagactaaaatacctagccagtcccgctggcaaggacgagtacgcacaatctcttgtcgctaaccaaagatcgcttttagaggtaatggccgagtttccctctgcaaaaccaccacttggggtttttttcgcggctattgctcctcgtcttcaaccaaggttctattcaatttcctctagtccgcgtatggctcctagtagaatccatgttacatgtgcattagtctacgaaaagactccaggtggtagaattcataagggagtttgttctacttggatgaaaaatgctattccgctggaagaatcacgtgactgctcgtgggcccccatctttgtacgtcaaagtaattttaagcttcctgcagaccctaaggtgccagtgataatgataggtccaggtaccggcttggctcctttcagaggattcttacaggaaaggttagctttgaaggaagaaggcgcagaattgggtactgctgtgttcttctttggttgtcgtaacagaaaaatggactacatttacgaagatgagctaaaccatttcttagaaattggtgccttgtccgaactattagtcgccttcagcagggagggccctacgaagcaatacgttcagcataaaatggctgaaaaagcgtcagacatttggcgaatgataagtgatggtgcctatgtgtatgtgtgcggggatgcaaagggtatggctcgtgatgtccacagaacactacatactatcgcccaagagcaaggctcgatggattctacacaagctgaaggttttgtaaagaatctacaaatgacgggtaggtacctaagagatgtttggatggcgtccgatcaaaaattacataaatttgatgaagtatccaagcacaataagactaaagattgttggttaattattaatggtaaagtatacgatgtcactccatttatggatgatcatcctggcggtgacgaggttttgctgtctgcaactggcaaggatgcaactaacgactttgaagatgttggtcattcagactctgctagagaaatgatggacaagtattacattggggaaatggatatggcaaccgttccactaaaaagaacttacattccccctcaacaggcgcaatataatccagacaaaacaccagaa

SEQ ID NO: 1479 - DNA, 3873 bp, Artificial Sequence
  G8H-CPR-CYB5 engineered fusion
atggattttctgacaattttcattggtcctcttctggcaatcattgcattgttctacgctcgcttaacaattagcactcgtggaaagaatctacccccaggtcccactcctttaccatttattggtaatttacacttgctcggtcatcatccccataagtctttggcacgtcttgccaagacttatggtccattgatgttacttagactagggtctgaaaatactgtggtcgtatcttcggctgccgttgctaaagaagtattgcaaaaacatgatttggcctttagttctcgatccatacctgatgcagttcatgcacacgatcaattcaagtactccgtggtttggttgccagttgcctctagatggagatctttaagaaaaactatgaactccaatatcttttcgggctcctgcttagatgccaatcagcatttaagaagtaggaaggttgaagaattaatcgcctattgtaaagaaagctgtaggcgtgctgaagcagtagacgtcgggcgtgctgctttcagaaccgctttaaattctttgtcaaacacaattttttctcgagaccttgctgatccattatccgactctggtaaggaatttaaggacgttgtttcttcgatcatgatggaggcgggcaagccaaacagtgtagactactatccgttcctgtctcgattcgatccccaaggaatccgtagaaggaccgcaatctattttgataaactgattaacatcttcaagggtttgattgacgaacgtctcgaaaaaagaaggtcgcagtacgaagaggctacggatgtaatcgatatattacttaacactattgaacagaacccagaagaaatcgaccgaactcatatcgagagaatgttcttagatctctttttggctggtacagatacgacatcttcgacggtcgaatgggccatggctgaagccatgaagaacccagaaaccatgaagaaagctaaggcggaattagctcaagttatcggcaaggggaaaatagtccaagaaactgatataccacacctaccatatttgcaatgcatcgtaaaggagacactacgattacacccacctgtacccttccttatcccacgtcgtgttcatgaagacgtggacatattgggttatgtcgttccaaataactcacaagtgttcgttaacatgtgggccattgggagggacccagatatgtggaaaaatccattacaatttgatcccgaccgttttcatgattccgaagtcggtctgagaggtaaagattttgaattgattcccttcggcgctggcagaagaatttgcccaggattacctttggctatgcgtatggtgcctgttgttttaggatctctcttgaactccttcgattggaaggtcgaaggtggtaaagaactggaaatgaatgaaaagtttggaataactcttgaaaaagcacaacctttaatggcagtacccatcgcattaggtggcggctctggcggaagcacatctagcggtagttccggtggttggagacggtcctccggatctggtaaaaaggttgttgaaccacctaaactaatcgtgccaaaaagtgttgtcgaaccagaggaaatcgatgaaggtaagaaaaagtttactatattttttggcacccagacaggtacggctgagggcttcgcaaaggcactagccgaggaagctaaagctaggtatgaaaaggcagtcattaaggttatcgatatagacgattatgcggctgatgacgaggaatatgaagaaaaatttaggaaggaaacgttagcttttttcattctggctacttacggcgatggtgaaccaacagacaatgcagccagattctacaagtggtttgttgaagggaatgacaggggtgattggttaaaaaatttgcaatacggtgtttttggcctcgggaatcgccagtacgaacatttcaataagatagccaaagtggtagatgagaaggttgcggaacaaggtggcaaacgtatcgtccccttagttttaggcgatgacgatcagtgtattgaagacgatttcgcggcatggcgtgaaaatgtttggcccgaacttgataatcttcttagagacgaagacgatactactgtttcaacaacctacacggccgcaatccccgaatacagagttgttttcccagataagtcagatagcttaatttcagaagcaaatggtcacgctaatggttatgctaatgggaatacggtctacgatgctcaacacccatgcagatctaatgttgcagtccgcaaggagttacacactccagcatcagatcgctcatgtactcatcttgatttcgatatcgctggcaccggattgagctacgggactggagatcatgtaggtgtctattgtgataatttatctgaaaccgtcgaggaagctgagaggttgcttaatctgccgcctgaaacgtattttagcctccacgctgataaggaagacggcacacctttggcaggatcttctttgcctcctccctttccaccttgtacattacggactgctttgactaggtatgcggatttgctgaacacccccaaaaagagcgctttgctggccttagctgcatatgcttccgatcctaatgaagccgatagactaaaatacctagccagtcccgctggcaaggacgagtacgcacaatctcttgtcgctaaccaaagatcgcttttagaggtaatggccgagtttccctctgcaaaaccaccacttggggtttttttcgcggctattgctcctcgtcttcaaccaaggttctattcaatttcctctagtccgcgtatggctcctagtagaatccatgttacatgtgcattagtctacgaaaagactccaggtggtagaattcataagggagtttgttctacttggatgaaaaatgctattccgctggaagaatcacgtgactgctcgtgggcccccatctttgtacgtcaaagtaattttaagcttcctgcagaccctaaggtgccagtgataatgataggtccaggtaccggcttggctcctttcagaggattcttacaggaaaggttagctttgaaggaagaaggcgcagaattgggtactgctgtgttcttctttggttgtcgtaacagaaaaatggactacatttacgaagatgagctaaaccatttcttagaaattggtgccttgtccgaactattagtcgccttcagcagggagggccctacgaagcaatacgttcagcataaaatggctgaaaaagcgtcagacatttggcgaatgataagtgatggtgcctatgtgtatgtgtgcggggatgcaaagggtatggctcgtgatgtccacagaacactacatactatcgcccaagagcaaggctcgatggattctacacaagctgaaggttttgtaaagaatctacaaatgacgggtaggtacctaagagatgtttggatgccgacattaactaagttatacacaatggaagaagcttctcaacataatacaaacgaagactgttggatagtcatagatggtaaagtctatgacgtcagctcttatgtcgatgatcatcctggcggtgatgacatactagttggagcaacaggtaaagatgctacagatgaattcgaagatgctggtcattctaaaagcgcaagagaattaatggagaaattttgtattggggaattagaagaaaccacaccaagtattccagaattggatatcgtctcacaaaagcaaaagatgaacgatcttccacataagatcttgaattttactaaacaatattggttcgcatcaattactgtggcaggtttgtccgtggtcgttgggtatctttgcatccgaaaaaagcaaacaact

SEQ ID NO: 1480 - DNA, 3813 bp, Artificial Sequence
  G8H-CPR-CYB5 engineered fusion
atggattttctgacaattttcattggtcctcttctggcaatcattgcattgttctacgctcgcttaacaattagcactcgtggaaagaatctacccccaggtcccactcctttaccatttattggtaatttacacttgctcggtcatcatccccataagtctttggcacgtcttgccaagacttatggtccattgatgttacttagactagggtctgaaaatactgtggtcgtatcttcggctgccgttgctaaagaagtattgcaaaaacatgatttggcctttagttctcgatccatacctgatgcagttcatgcacacgatcaattcaagtactccgtggtttggttgccagttgcctctagatggagatctttaagaaaaactatgaactccaatatcttttcgggctcctgcttagatgccaatcagcatttaagaagtaggaaggttgaagaattaatcgcctattgtaaagaaagctgtaggcgtgctgaagcagtagacgtcgggcgtgctgctttcagaaccgctttaaattctttgtcaaacacaattttttctcgagaccttgctgatccattatccgactctggtaaggaatttaaggacgttgtttcttcgatcatgatggaggcgggcaagccaaacagtgtagactactatccgttcctgtctcgattcgatccccaaggaatccgtagaaggaccgcaatctattttgataaactgattaacatcttcaagggtttgattgacgaacgtctcgaaaaaagaaggtcgcagtacgaagaggctacggatgtaatcgatatattacttaacactattgaacagaacccagaagaaatcgaccgaactcatatcgagagaatgttcttagatctctttttggctggtacagatacgacatcttcgacggtcgaatgggccatggctgaagccatgaagaacccagaaaccatgaagaaagctaaggcggaattagctcaagttatcggcaaggggaaaatagtccaagaaactgatataccacacctaccatatttgcaatgcatcgtaaaggagacactacgattacacccacctgtacccttccttatcccacgtcgtgttcatgaagacgtggacatattgggttatgtcgttccaaataactcacaagtgttcgttaacatgtgggccattgggagggacccagatatgtggaaaaatccattacaatttgatcccgaccgttttcatgattccgaagtcggtctgagaggtaaagattttgaattgattcccttcggcgctggcagaagaatttgcccaggattacctttggctatgcgtatggtgcctgttgttttaggatctctcttgaactccttcgattggaaggtcgaaggtggtaaagaactggaaatgaatgaaaagtttggaataactcttgaaaaagcacaacctttaatggcagtacccatcgcattaggtggcggctctggcggaagcacatctagcggtagttccggtggttggagacggtcctccggatctggtaaaaaggttgttgaaccacctaaactaatcgtgccaaaaagtgttgtcgaaccagaggaaatcgatgaaggtaagaaaaagtttactatattttttggcacccagacaggtacggctgagggcttcgcaaaggcactagccgaggaagctaaagctaggtatgaaaaggcagtcattaaggttatcgatatagacgattatgcggctgatgacgaggaatatgaagaaaaatttaggaaggaaacgttagcttttttcattctggctacttacggcgatggtgaaccaacagacaatgcagccagattctacaagtggtttgttgaagggaatgacaggggtgattggttaaaaaatttgcaatacggtgtttttggcctcgggaatcgccagtacgaacatttcaataagatagccaaagtggtagatgagaaggttgcggaacaaggtggcaaacgtatcgtccccttagttttaggcgatgacgatcagtgtattgaagacgatttcgcggcatggcgtgaaaatgtttggcccgaacttgataatcttcttagagacgaagacgatactactgtttcaacaacctacacggccgcaatccccgaatacagagttgttttcccagataagtcagatagcttaatttcagaagcaaatggtcacgctaatggttatgctaatgggaatacggtctacgatgctcaacacccatgcagatctaatgttgcagtccgcaaggagttacacactccagcatcagatcgctcatgtactcatcttgatttcgatatcgctggcaccggattgagctacgggactggagatcatgtaggtgtctattgtgataatttatctgaaaccgtcgaggaagctgagaggttgcttaatctgccgcctgaaacgtattttagcctccacgctgataaggaagacggcacacctttggcaggatcttctttgcctcctccctttccaccttgtacattacggactgctttgactaggtatgcggatttgctgaacacccccaaaaagagcgctttgctggccttagctgcatatgcttccgatcctaatgaagccgatagactaaaatacctagccagtcccgctggcaaggacgagtacgcacaatctcttgtcgctaaccaaagatcgcttttagaggtaatggccgagtttccctctgcaaaaccaccacttggggtttttttcgcggctattgctcctcgtcttcaaccaaggttctattcaatttcctctagtccgcgtatggctcctagtagaatccatgttacatgtgcattagtctacgaaaagactccaggtggtagaattcataagggagtttgttctacttggatgaaaaatgctattccgctggaagaatcacgtgactgctcgtgggcccccatctttgtacgtcaaagtaattttaagcttcctgcagaccctaaggtgccagtgataatgataggtccaggtaccggcttggctcctttcagaggattcttacaggaaaggttagctttgaaggaagaaggcgcagaattgggtactgctgtgttcttctttggttgtcgtaacagaaaaatggactacatttacgaagatgagctaaaccatttcttagaaattggtgccttgtccgaactattagtcgccttcagcagggagggccctacgaagcaatacgttcagcataaaatggctgaaaaagcgtcagacatttggcgaatgataagtgatggtgcctatgtgtatgtgtgcggggatgcaaagggtatggctcgtgatgtccacagaacactacatactatcgcccaagagcaaggctcgatggattctacacaagctgaaggttttgtaaagaatctacaaatgacgggtaggtacctaagagatgtttggatgccgacattaactaagttatacacaatggaagaagcttctcaacataatacaaacgaagactgttggatagtcatagatggtaaagtctatgacgtcagctcttatgtcgatgatcatcctggcggtgatgacatactagttggagcaacaggtaaagatgctacagatgaattcgaagatgctggtcattctaaaagcgcaagagaattaatggagaaattttgtattggggaattagaagaaaccacaccaagtattccagaattggatatcgtctcacaaaagcaaaagatgaacgatcttccacataagatcttgaattttactaaacaacgaaaaaagcaaacaact

SEQ ID NO: 1481 - DNA, 3795 bp, Artificial Sequence
  G8H-CPR-CYB5 engineered fusion
atggattttctgacaattttcattggtcctcttctggcaatcattgcattgttctacgctcgcttaacaattagcactcgtggaaagaatctacccccaggtcccactcctttaccatttattggtaatttacacttgctcggtcatcatccccataagtctttggcacgtcttgccaagacttatggtccattgatgttacttagactagggtctgaaaatactgtggtcgtatcttcggctgccgttgctaaagaagtattgcaaaaacatgatttggcctttagttctcgatccatacctgatgcagttcatgcacacgatcaattcaagtactccgtggtttggttgccagttgcctctagatggagatctttaagaaaaactatgaactccaatatcttttcgggctcctgcttagatgccaatcagcatttaagaagtaggaaggttgaagaattaatcgcctattgtaaagaaagctgtaggcgtgctgaagcagtagacgtcgggcgtgctgctttcagaaccgctttaaattctttgtcaaacacaattttttctcgagaccttgctgatccattatccgactctggtaaggaatttaaggacgttgtttcttcgatcatgatggaggcgggcaagccaaacagtgtagactactatccgttcctgtctcgattcgatccccaaggaatccgtagaaggaccgcaatctattttgataaactgattaacatcttcaagggtttgattgacgaacgtctcgaaaaaagaaggtcgcagtacgaagaggctacggatgtaatcgatatattacttaacactattgaacagaacccagaagaaatcgaccgaactcatatcgagagaatgttcttagatctctttttggctggtacagatacgacatcttcgacggtcgaatgggccatggctgaagccatgaagaacccagaaaccatgaagaaagctaaggcggaattagctcaagttatcggcaaggggaaaatagtccaagaaactgatataccacacctaccatatttgcaatgcatcgtaaaggagacactacgattacacccacctgtacccttccttatcccacgtcgtgttcatgaagacgtggacatattgggttatgtcgttccaaataactcacaagtgttcgttaacatgtgggccattgggagggacccagatatgtggaaaaatccattacaatttgatcccgaccgttttcatgattccgaagtcggtctgagaggtaaagattttgaattgattcccttcggcgctggcagaagaatttgcccaggattacctttggctatgcgtatggtgcctgttgttttaggatctctcttgaactccttcgattggaaggtcgaaggtggtaaagaactggaaatgaatgaaaagtttggaataactcttgaaaaagcacaacctttaatggcagtacccatcgcattaggtggcggctctggcggaagcacatctagcggtagttccggtggttggagacggtcctccggatctggtaaaaaggttgttgaaccacctaaactaatcgtgccaaaaagtgttgtcgaaccagaggaaatcgatgaaggtaagaaaaagtttactatattttttggcacccagacaggtacggctgagggcttcgcaaaggcactagccgaggaagctaaagctaggtatgaaaaggcagtcattaaggttatcgatatagacgattatgcggctgatgacgaggaatatgaagaaaaatttaggaaggaaacgttagcttttttcattctggctacttacggcgatggtgaaccaacagacaatgcagccagattctacaagtggtttgttgaagggaatgacaggggtgattggttaaaaaatttgcaatacggtgtttttggcctcgggaatcgccagtacgaacatttcaataagatagccaaagtggtagatgagaaggttgcggaacaaggtggcaaacgtatcgtccccttagttttaggcgatgacgatcagtgtattgaagacgatttcgcggcatggcgtgaaaatgtttggcccgaacttgataatcttcttagagacgaagacgatactactgtttcaacaacctacacggccgcaatccccgaatacagagttgttttcccagataagtcagatagcttaatttcagaagcaaatggtcacgctaatggttatgctaatgggaatacggtctacgatgctcaacacccatgcagatctaatgttgcagtccgcaaggagttacacactccagcatcagatcgctcatgtactcatcttgatttcgatatcgctggcaccggattgagctacgggactggagatcatgtaggtgtctattgtgataatttatctgaaaccgtcgaggaagctgagaggttgcttaatctgccgcctgaaacgtattttagcctccacgctgataaggaagacggcacacctttggcaggatcttctttgcctcctccctttccaccttgtacattacggactgctttgactaggtatgcggatttgctgaacacccccaaaaagagcgctttgctggccttagctgcatatgcttccgatcctaatgaagccgatagactaaaatacctagccagtcccgctggcaaggacgagtacgcacaatctcttgtcgctaaccaaagatcgcttttagaggtaatggccgagtttccctctgcaaaaccaccacttggggtttttttcgcggctattgctcctcgtcttcaaccaaggttctattcaatttcctctagtccgcgtatggctcctagtagaatccatgttacatgtgcattagtctacgaaaagactccaggtggtagaattcataagggagtttgttctacttggatgaaaaatgctattccgctggaagaatcacgtgactgctcgtgggcccccatctttgtacgtcaaagtaattttaagcttcctgcagaccctaaggtgccagtgataatgataggtccaggtaccggcttggctcctttcagaggattcttacaggaaaggttagctttgaaggaagaaggcgcagaattgggtactgctgtgttcttctttggttgtcgtaacagaaaaatggactacatttacgaagatgagctaaaccatttcttagaaattggtgccttgtccgaactattagtcgccttcagcagggagggccctacgaagcaatacgttcagcataaaatggctgaaaaagcgtcagacatttggcgaatgataagtgatggtgcctatgtgtatgtgtgcggggatgcaaagggtatggctcgtgatgtccacagaacactacatactatcgcccaagagcaaggctcgatggattctacacaagctgaaggttttgtaaagaatctacaaatgacgggtaggtacctaagagatgtttggatgccgacattaactaagttatacacaatggaagaagcttctcaacataatacaaacgaagactgttggatagtcatagatggtaaagtctatgacgtcagctcttatgtcgatgatcatcctggcggtgatgacatactagttggagcaacaggtaaagatgctacagatgaattcgaagatgctggtcattctaaaagcgcaagagaattaatggagaaattttgtattggggaattagaagaaaccacaccaagtattccagaattggatatcgtctcacaaaagcaaaagatgaacgatcttccacataagatcttgaattttactaaacaa

SEQ ID NO: 1482 - DNA, 2313 bp, Artificial Sequence
  8HGO-ISY engineered fusion
atgacaaagactaacagtccagccccatcggttattacatgtaaagccgccgttgtctggaaaagcggagaacctccaaaagtggaggaaattcaggtcgaccctcccaaagcaagtgaagtccgtataaaaatgctgtgcgcttccttatgtcacactgattttttagcgtgcaatgggttgcctgtgccgttattccccagaatacctgggcatgaaggagtcggaatgattgagagcgttggtgagaatgtgacgaacctaaaggagggagatattgtaatgcctctttatctaggtgaatgcggagagtgtttaaactgtaaatccggtagaacaaacctatgtcacaaatatcccttgggtttttcaggacttcttttggacggtacatcacgtatgtccatcggcgaacaaaaggtctaccatcattttagctgctctacctggtcagagtatattgttatagaggcggcttacgctgttaaagtcgatccaagggtgtcacttccacatgcttcgtttctttgttgcggatttactaccgggtttggcgctacttggcgcgatgttaatgtcgttaaggggagcacggtggccgtcttgggcctcggtgcagtcggacttggtgcagtacaaggcgcgaaaagtcaaggcgcttcgagaatcattgggttggatataaatgataaaaagagagagaaaggcgaagcgtttggtatgactgaattcatcaacccgaaaggttcaaataagtctatttctgaattgattaacgaagccactggtggtttaggacttgactacgtgtatgagtgcactggcgtccctgccttattaaatgaagctattgagtcttccaaagtaggtctaggtaccgctgttttgattggggctggactagaaacaagtggtgaaattaaattcattcccttattatgtggtaggacagtaaagggtagtatatacggtggggtgagacctaagagtgaccttccgacattgattgagaagtgtataaataaggagattcctatggatgaactgatgacccacgaggtttctctcagcgaaataaacaaaggctttgaatatctaaagcatccagattgtgtaaaggtggtgattaaatttggcggtggatccggtatgtcttggtggtggaaaagatcaataggtgccggcaaaaatctcccgaaccaaaacaaagagaacggggtatgcaagtcgtacaaatcggtcgctctagttgtgggcgttactggtattgttggcagttccctagccgaagtccttaaattgcccgatacccctggtggtccgtggaaagtatatggtgtcgctaggcgtccatgtcctgtatggcttgccaagaaacctgttgagtacattcaatgtgatgtgtccgataatcaagaaaccatatcaaaattgagccccttgaaggatatcacccacattttctacgtatcttggatcggatctgaagactgccaaactaatgccacaatgttcaaaaatattctgaatagtgtcatacccaatgcttctaatttacagcatgtttgtctacaaaccggtattaaacattattttggcatatttgaagaaggttctaaagtagtgccgcatgattctccatttaccgaggatcttcccagattgaatgttccaaatttttaccacgacttagaggacatattatatgaggagacaggaaagaataacctcacgtggtctgtgcatagacctgcattagtattcggattttctccctgcagtatgatgaacattgtgagtactctttgcgtgtatgcgacaatttgcaagcatgagaataaggctttagtttacccagggagcaagaatagctggaactgttatgctgatgctgtagatgcagatttggtagccgaacatgaaatctgggcagccgtcgatccaaaagccaaaaatcaagtattaaattgcaacaatggggatgttttcaaatggaaacatatatggaagaaactggccgaggaattcggtattgaaatggtagggtatgttgaaggtaaagaacaagtctccttggcagagctaatgaaagataaggatcaagtttgggacgagattgtaaaaaaaaataacttagttcctactaagttgaaagaaatagcagctttttggtttgctgatattgcattttgctctgaaaatctaattagttcaatgaataagtccaaagaattgggatttttaggttttaggaacagtatgaagtcttttgtttcctgcattgataagatgagggactacagatttattccg

SEQ ID NO: 1483 - DNA, 2337 bp, Artificial Sequence
  8HGO-ISY engineered fusion
atgacaaagactaacagtccagccccatcggttattacatgtaaagccgccgttgtctggaaaagcggagaacctccaaaagtggaggaaattcaggtcgaccctcccaaagcaagtgaagtccgtataaaaatgctgtgcgcttccttatgtcacactgattttttagcgtgcaatgggttgcctgtgccgttattccccagaatacctgggcatgaaggagtcggaatgattgagagcgttggtgagaatgtgacgaacctaaaggagggagatattgtaatgcctctttatctaggtgaatgcggagagtgtttaaactgtaaatccggtagaacaaacctatgtcacaaatatcccttgggtttttcaggacttcttttggacggtacatcacgtatgtccatcggcgaacaaaaggtctaccatcattttagctgctctacctggtcagagtatattgttatagaggcggcttacgctgttaaagtcgatccaagggtgtcacttccacatgcttcgtttctttgttgcggatttactaccgggtttggcgctacttggcgcgatgttaatgtcgttaaggggagcacggtggccgtcttgggcctcggtgcagtcggacttggtgcagtacaaggcgcgaaaagtcaaggcgcttcgagaatcattgggttggatataaatgataaaaagagagagaaaggcgaagcgtttggtatgactgaattcatcaacccgaaaggttcaaataagtctatttctgaattgattaacgaagccactggtggtttaggacttgactacgtgtatgagtgcactggcgtccctgccttattaaatgaagctattgagtcttccaaagtaggtctaggtaccgctgttttgattggggctggactagaaacaagtggtgaaattaaattcattcccttattatgtggtaggacagtaaagggtagtatatacggtggggtgagacctaagagtgaccttccgacattgattgagaagtgtataaataaggagattcctatggatgaactgatgacccacgaggtttctctcagcgaaataaacaaaggctttgaatatctaaagcatccagattgtgtaaaggtggtgattaaatttggcggtggatccggtatgtcgctttcgtggtggagagccggagccgctaaaaagagaatggatgatgatgaatcccttttggttaaacaacagcagcagcaatgtgtggctctaattgttggcgtcaccgggttagtgggtaattcactagcagaaatgttaccactaccagatactccaggcgggccatggaaagtgtatggcgtagcaagacgggctcgtccttcatggaatgaagatcaaccaatgacatatatatcatgcgatgtcagtaacaccggcgaagtggaagccaaattatctcctttgtcagatgtaactcatattttttacgctacgtggacgtctagatccacagaggaggaaaattgtgaagcaaatggcaaaatgctcaaaaatgttctagatgcaatgataccgaattgccctaacttgaaacacatttgtctacaaaccggtagatttcattatgttgcttccgttgtagactggaagatcaatggatcacacgacaccccactaaccgaagacttgcccagattaaaaactaacaatttttattatacccaagaggacattcttttagaggaagttaagagaaaagaaggtcttacttggtcggttcatcgtccaggtacaatcttcggattctctccttattccatgatgaatctcgttggtacattatgcgtctatgctgccatatgtaaacaagaaggtgcagttttgcgatttcccggttgcaaaggtgcgtgggatggacattctgactgtgctgatgccgatttgatcgctgaacaacaaatatgggccgcattagacccgcatgctaagaaccaagctttcaatgtatcgaacggagatttattcaagtggaaacatttatggaaagttctcgccgaccaatttggtgtggagtgtggtgactatgaggaaggacaacagttgagattgcaagacgttatgaaagacaagggtcctgtttgggacaagatcgtggcagaaaacggactttctaacacaaagctcgaagacgtcggtaagtggtggttttccgacacaattttgtggaatgaatgtcgcttggattctatgaataaaagtaaagaacatgggttcttaggtttcagaaattcaaagaattgctttttgtactggatacataaagtcaaagcctacaatctcgtgccaagtacatatacg

SEQ ID NO: 1484 - DNA, 2328 bp, Artificial Sequence
  8HGO-ISY engineered fusion
atgacaaagactaacagtccagccccatcggttattacatgtaaagccgccgttgtctggaaaagcggagaacctccaaaagtggaggaaattcaggtcgaccctcccaaagcaagtgaagtccgtataaaaatgctgtgcgcttccttatgtcacactgattttttagcgtgcaatgggttgcctgtgccgttattccccagaatacctgggcatgaaggagtcggaatgattgagagcgttggtgagaatgtgacgaacctaaaggagggagatattgtaatgcctctttatctaggtgaatgcggagagtgtttaaactgtaaatccggtagaacaaacctatgtcacaaatatcccttgggtttttcaggacttcttttggacggtacatcacgtatgtccatcggcgaacaaaaggtctaccatcattttagctgctctacctggtcagagtatattgttatagaggcggcttacgctgttaaagtcgatccaagggtgtcacttccacatgcttcgtttctttgttgcggatttactaccgggtttggcgctacttggcgcgatgttaatgtcgttaaggggagcacggtggccgtcttgggcctcggtgcagtcggacttggtgcagtacaaggcgcgaaaagtcaaggcgcttcgagaatcattgggttggatataaatgataaaaagagagagaaaggcgaagcgtttggtatgactgaattcatcaacccgaaaggttcaaataagtctatttctgaattgattaacgaagccactggtggtttaggacttgactacgtgtatgagtgcactggcgtccctgccttattaaatgaagctattgagtcttccaaagtaggtctaggtaccgctgttttgattggggctggactagaaacaagtggtgaaattaaattcattcccttattatgtggtaggacagtaaagggtagtatatacggtggggtgagacctaagagtgaccttccgacattgattgagaagtgtataaataaggagattcctatggatgaactgatgacccacgaggtttctctcagcgaaataaacaaaggctttgaatatctaaagcatccagattgtgtaaaggtggtgattaaatttggtggtggcgggagcggtggaggaggatcaatgtcttggtggtggaaaagatcaataggtgccggcaaaaatctcccgaaccaaaacaaagagaacggggtatgcaagtcgtacaaatcggtcgctctagttgtgggcgttactggtattgttggcagttccctagccgaagtccttaaattgcccgatacccctggtggtccgtggaaagtatatggtgtcgctaggcgtccatgtcctgtatggcttgccaagaaacctgttgagtacattcaatgtgatgtgtccgataatcaagaaaccatatcaaaattgagccccttgaaggatatcacccacattttctacgtatcttggatcggatctgaagactgccaaactaatgccacaatgttcaaaaatattctgaatagtgtcatacccaatgcttctaatttacagcatgtttgtctacaaaccggtattaaacattattttggcatatttgaagaaggttctaaagtagtgccgcatgattctccatttaccgaggatcttcccagattgaatgttccaaatttttaccacgacttagaggacatattatatgaggagacaggaaagaataacctcacgtggtctgtgcatagacctgcattagtattcggattttctccctgcagtatgatgaacattgtgagtactctttgcgtgtatgcgacaatttgcaagcatgagaataaggctttagtttacccagggagcaagaatagctggaactgttatgctgatgctgtagatgcagatttggtagccgaacatgaaatctgggcagccgtcgatccaaaagccaaaaatcaagtattaaattgcaacaatggggatgttttcaaatggaaacatatatggaagaaactggccgaggaattcggtattgaaatggtagggtatgttgaaggtaaagaacaagtctccttggcagagctaatgaaagataaggatcaagtttgggacgagattgtaaaaaaaaataacttagttcctactaagttgaaagaaatagcagctttttggtttgctgatattgcattttgctctgaaaatctaattagttcaatgaataagtccaaagaattgggatttttaggttttaggaacagtatgaagtcttttgtttcctgcattgataagatgagggactacagatttattccg

SEQ ID NO: 1485 - DNA, 2352 bp, Artificial Sequence
  8HGO-ISY engineered fusion
atgacaaagactaacagtccagccccatcggttattacatgtaaagccgccgttgtctggaaaagcggagaacctccaaaagtggaggaaattcaggtcgaccctcccaaagcaagtgaagtccgtataaaaatgctgtgcgcttccttatgtcacactgattttttagcgtgcaatgggttgcctgtgccgttattccccagaatacctgggcatgaaggagtcggaatgattgagagcgttggtgagaatgtgacgaacctaaaggagggagatattgtaatgcctctttatctaggtgaatgcggagagtgtttaaactgtaaatccggtagaacaaacctatgtcacaaatatcccttgggtttttcaggacttcttttggacggtacatcacgtatgtccatcggcgaacaaaaggtctaccatcattttagctgctctacctggtcagagtatattgttatagaggcggcttacgctgttaaagtcgatccaagggtgtcacttccacatgcttcgtttctttgttgcggatttactaccgggtttggcgctacttggcgcgatgttaatgtcgttaaggggagcacggtggccgtcttgggcctcggtgcagtcggacttggtgcagtacaaggcgcgaaaagtcaaggcgcttcgagaatcattgggttggatataaatgataaaaagagagagaaaggcgaagcgtttggtatgactgaattcatcaacccgaaaggttcaaataagtctatttctgaattgattaacgaagccactggtggtttaggacttgactacgtgtatgagtgcactggcgtccctgccttattaaatgaagctattgagtcttccaaagtaggtctaggtaccgctgttttgattggggctggactagaaacaagtggtgaaattaaattcattcccttattatgtggtaggacagtaaagggtagtatatacggtggggtgagacctaagagtgaccttccgacattgattgagaagtgtataaataaggagattcctatggatgaactgatgacccacgaggtttctctcagcgaaataaacaaaggctttgaatatctaaagcatccagattgtgtaaaggtggtgattaaatttggtggtggcgggagcggtggaggaggatcaatgtcgctttcgtggtggagagccggagccgctaaaaagagaatggatgatgatgaatcccttttggttaaacaacagcagcagcaatgtgtggctctaattgttggcgtcaccgggttagtgggtaattcactagcagaaatgttaccactaccagatactccaggcgggccatggaaagtgtatggcgtagcaagacgggctcgtccttcatggaatgaagatcaaccaatgacatatatatcatgcgatgtcagtaacaccggcgaagtggaagccaaattatctcctttgtcagatgtaactcatattttttacgctacgtggacgtctagatccacagaggaggaaaattgtgaagcaaatggcaaaatgctcaaaaatgttctagatgcaatgataccgaattgccctaacttgaaacacatttgtctacaaaccggtagatttcattatgttgcttccgttgtagactggaagatcaatggatcacacgacaccccactaaccgaagacttgcccagattaaaaactaacaatttttattatacccaagaggacattcttttagaggaagttaagagaaaagaaggtcttacttggtcggttcatcgtccaggtacaatcttcggattctctccttattccatgatgaatctcgttggtacattatgcgtctatgctgccatatgtaaacaagaaggtgcagttttgcgatttcccggttgcaaaggtgcgtgggatggacattctgactgtgctgatgccgatttgatcgctgaacaacaaatatgggccgcattagacccgcatgctaagaaccaagctttcaatgtatcgaacggagatttattcaagtggaaacatttatggaaagttctcgccgaccaatttggtgtggagtgtggtgactatgaggaaggacaacagttgagattgcaagacgttatgaaagacaagggtcctgtttgggacaagatcgtggcagaaaacggactttctaacacaaagctcgaagacgtcggtaagtggtggttttccgacacaattttgtggaatgaatgtcgcttggattctatgaataaaagtaaagaacatgggttcttaggtttcagaaattcaaagaattgctttttgtactggatacataaagtcaaagcctacaatctcgtgccaagtacatatacg

SEQ ID NO: 1486 - DNA, 2343 bp, Artificial Sequence
  8HGO-ISY engineered fusion
atgacaaagactaacagtccagccccatcggttattacatgtaaagccgccgttgtctggaaaagcggagaacctccaaaagtggaggaaattcaggtcgaccctcccaaagcaagtgaagtccgtataaaaatgctgtgcgcttccttatgtcacactgattttttagcgtgcaatgggttgcctgtgccgttattccccagaatacctgggcatgaaggagtcggaatgattgagagcgttggtgagaatgtgacgaacctaaaggagggagatattgtaatgcctctttatctaggtgaatgcggagagtgtttaaactgtaaatccggtagaacaaacctatgtcacaaatatcccttgggtttttcaggacttcttttggacggtacatcacgtatgtccatcggcgaacaaaaggtctaccatcattttagctgctctacctggtcagagtatattgttatagaggcggcttacgctgttaaagtcgatccaagggtgtcacttccacatgcttcgtttctttgttgcggatttactaccgggtttggcgctacttggcgcgatgttaatgtcgttaaggggagcacggtggccgtcttgggcctcggtgcagtcggacttggtgcagtacaaggcgcgaaaagtcaaggcgcttcgagaatcattgggttggatataaatgataaaaagagagagaaaggcgaagcgtttggtatgactgaattcatcaacccgaaaggttcaaataagtctatttctgaattgattaacgaagccactggtggtttaggacttgactacgtgtatgagtgcactggcgtccctgccttattaaatgaagctattgagtcttccaaagtaggtctaggtaccgctgttttgattggggctggactagaaacaagtggtgaaattaaattcattcccttattatgtggtaggacagtaaagggtagtatatacggtggggtgagacctaagagtgaccttccgacattgattgagaagtgtataaataaggagattcctatggatgaactgatgacccacgaggtttctctcagcgaaataaacaaaggctttgaatatctaaagcatccagattgtgtaaaggtggtgattaaatttggaggtggaggttccggtggaggtggaagtggcggtggagggtcaatgtcttggtggtggaaaagatcaataggtgccggcaaaaatctcccgaaccaaaacaaagagaacggggtatgcaagtcgtacaaatcggtcgctctagttgtgggcgttactggtattgttggcagttccctagccgaagtccttaaattgcccgatacccctggtggtccgtggaaagtatatggtgtcgctaggcgtccatgtcctgtatggcttgccaagaaacctgttgagtacattcaatgtgatgtgtccgataatcaagaaaccatatcaaaattgagccccttgaaggatatcacccacattttctacgtatcttggatcggatctgaagactgccaaactaatgccacaatgttcaaaaatattctgaatagtgtcatacccaatgcttctaatttacagcatgtttgtctacaaaccggtattaaacattattttggcatatttgaagaaggttctaaagtagtgccgcatgattctccatttaccgaggatcttcccagattgaatgttccaaatttttaccacgacttagaggacatattatatgaggagacaggaaagaataacctcacgtggtctgtgcatagacctgcattagtattcggattttctccctgcagtatgatgaacattgtgagtactctttgcgtgtatgcgacaatttgcaagcatgagaataaggctttagtttacccagggagcaagaatagctggaactgttatgctgatgctgtagatgcagatttggtagccgaacatgaaatctgggcagccgtcgatccaaaagccaaaaatcaagtattaaattgcaacaatggggatgttttcaaatggaaacatatatggaagaaactggccgaggaattcggtattgaaatggtagggtatgttgaaggtaaagaacaagtctccttggcagagctaatgaaagataaggatcaagtttgggacgagattgtaaaaaaaaataacttagttcctactaagttgaaagaaatagcagctttttggtttgctgatattgcattttgctctgaaaatctaattagttcaatgaataagtccaaagaattgggatttttaggttttaggaacagtatgaagtcttttgtttcctgcattgataagatgagggactacagatttattccg

SEQ ID NO: 1487 - DNA, 2367 bp, Artificial Sequence
  8HGO-ISY engineered fusion
atgacaaagactaacagtccagccccatcggttattacatgtaaagccgccgttgtctggaaaagcggagaacctccaaaagtggaggaaattcaggtcgaccctcccaaagcaagtgaagtccgtataaaaatgctgtgcgcttccttatgtcacactgattttttagcgtgcaatgggttgcctgtgccgttattccccagaatacctgggcatgaaggagtcggaatgattgagagcgttggtgagaatgtgacgaacctaaaggagggagatattgtaatgcctctttatctaggtgaatgcggagagtgtttaaactgtaaatccggtagaacaaacctatgtcacaaatatcccttgggtttttcaggacttcttttggacggtacatcacgtatgtccatcggcgaacaaaaggtctaccatcattttagctgctctacctggtcagagtatattgttatagaggcggcttacgctgttaaagtcgatccaagggtgtcacttccacatgcttcgtttctttgttgcggatttactaccgggtttggcgctacttggcgcgatgttaatgtcgttaaggggagcacggtggccgtcttgggcctcggtgcagtcggacttggtgcagtacaaggcgcgaaaagtcaaggcgcttcgagaatcattgggttggatataaatgataaaaagagagagaaaggcgaagcgtttggtatgactgaattcatcaacccgaaaggttcaaataagtctatttctgaattgattaacgaagccactggtggtttaggacttgactacgtgtatgagtgcactggcgtccctgccttattaaatgaagctattgagtcttccaaagtaggtctaggtaccgctgttttgattggggctggactagaaacaagtggtgaaattaaattcattcccttattatgtggtaggacagtaaagggtagtatatacggtggggtgagacctaagagtgaccttccgacattgattgagaagtgtataaataaggagattcctatggatgaactgatgacccacgaggtttctctcagcgaaataaacaaaggctttgaatatctaaagcatccagattgtgtaaaggtggtgattaaatttggaggtggaggttccggtggaggtggaagtggcggtggagggtcaatgtcgctttcgtggtggagagccggagccgctaaaaagagaatggatgatgatgaatcccttttggttaaacaacagcagcagcaatgtgtggctctaattgttggcgtcaccgggttagtgggtaattcactagcagaaatgttaccactaccagatactccaggcgggccatggaaagtgtatggcgtagcaagacgggctcgtccttcatggaatgaagatcaaccaatgacatatatatcatgcgatgtcagtaacaccggcgaagtggaagccaaattatctcctttgtcagatgtaactcatattttttacgctacgtggacgtctagatccacagaggaggaaaattgtgaagcaaatggcaaaatgctcaaaaatgttctagatgcaatgataccgaattgccctaacttgaaacacatttgtctacaaaccggtagatttcattatgttgcttccgttgtagactggaagatcaatggatcacacgacaccccactaaccgaagacttgcccagattaaaaactaacaatttttattatacccaagaggacattcttttagaggaagttaagagaaaagaaggtcttacttggtcggttcatcgtccaggtacaatcttcggattctctccttattccatgatgaatctcgttggtacattatgcgtctatgctgccatatgtaaacaagaaggtgcagttttgcgatttcccggttgcaaaggtgcgtgggatggacattctgactgtgctgatgccgatttgatcgctgaacaacaaatatgggccgcattagacccgcatgctaagaaccaagctttcaatgtatcgaacggagatttattcaagtggaaacatttatggaaagttctcgccgaccaatttggtgtggagtgtggtgactatgaggaaggacaacagttgagattgcaagacgttatgaaagacaagggtcctgtttgggacaagatcgtggcagaaaacggactttctaacacaaagctcgaagacgtcggtaagtggtggttttccgacacaattttgtggaatgaatgtcgcttggattctatgaataaaagtaaagaacatgggttcttaggtttcagaaattcaaagaattgctttttgtactggatacataaagtcaaagcctacaatctcgtgccaagtacatatacg

SEQ ID NO: 1488 - DNA, 2313 bp, Artificial Sequence
  8HGO-ISY engineered fusion
atgtcttggtggtggaaaagatcaataggtgccggcaaaaatctcccgaaccaaaacaaagagaacggggtatgcaagtcgtacaaatcggtcgctctagttgtgggcgttactggtattgttggcagttccctagccgaagtccttaaattgcccgatacccctggtggtccgtggaaagtatatggtgtcgctaggcgtccatgtcctgtatggcttgccaagaaacctgttgagtacattcaatgtgatgtgtccgataatcaagaaaccatatcaaaattgagccccttgaaggatatcacccacattttctacgtatcttggatcggatctgaagactgccaaactaatgccacaatgttcaaaaatattctgaatagtgtcatacccaatgcttctaatttacagcatgtttgtctacaaaccggtattaaacattattttggcatatttgaagaaggttctaaagtagtgccgcatgattctccatttaccgaggatcttcccagattgaatgttccaaatttttaccacgacttagaggacatattatatgaggagacaggaaagaataacctcacgtggtctgtgcatagacctgcattagtattcggattttctccctgcagtatgatgaacattgtgagtactctttgcgtgtatgcgacaatttgcaagcatgagaataaggctttagtttacccagggagcaagaatagctggaactgttatgctgatgctgtagatgcagatttggtagccgaacatgaaatctgggcagccgtcgatccaaaagccaaaaatcaagtattaaattgcaacaatggggatgttttcaaatggaaacatatatggaagaaactggccgaggaattcggtattgaaatggtagggtatgttgaaggtaaagaacaagtctccttggcagagctaatgaaagataaggatcaagtttgggacgagattgtaaaaaaaaataacttagttcctactaagttgaaagaaatagcagctttttggtttgctgatattgcattttgctctgaaaatctaattagttcaatgaataagtccaaagaattgggatttttaggttttaggaacagtatgaagtcttttgtttcctgcattgataagatgagggactacagatttattccgggcggtggatccggtatgacaaagactaacagtccagccccatcggttattacatgtaaagccgccgttgtctggaaaagcggagaacctccaaaagtggaggaaattcaggtcgaccctcccaaagcaagtgaagtccgtataaaaatgctgtgcgcttccttatgtcacactgattttttagcgtgcaatgggttgcctgtgccgttattccccagaatacctgggcatgaaggagtcggaatgattgagagcgttggtgagaatgtgacgaacctaaaggagggagatattgtaatgcctctttatctaggtgaatgcggagagtgtttaaactgtaaatccggtagaacaaacctatgtcacaaatatcccttgggtttttcaggacttcttttggacggtacatcacgtatgtccatcggcgaacaaaaggtctaccatcattttagctgctctacctggtcagagtatattgttatagaggcggcttacgctgttaaagtcgatccaagggtgtcacttccacatgcttcgtttctttgttgcggatttactaccgggtttggcgctacttggcgcgatgttaatgtcgttaaggggagcacggtggccgtcttgggcctcggtgcagtcggacttggtgcagtacaaggcgcgaaaagtcaaggcgcttcgagaatcattgggttggatataaatgataaaaagagagagaaaggcgaagcgtttggtatgactgaattcatcaacccgaaaggttcaaataagtctatttctgaattgattaacgaagccactggtggtttaggacttgactacgtgtatgagtgcactggcgtccctgccttattaaatgaagctattgagtcttccaaagtaggtctaggtaccgctgttttgattggggctggactagaaacaagtggtgaaattaaattcattcccttattatgtggtaggacagtaaagggtagtatatacggtggggtgagacctaagagtgaccttccgacattgattgagaagtgtataaataaggagattcctatggatgaactgatgacccacgaggtttctctcagcgaaataaacaaaggctttgaatatctaaagcatccagattgtgtaaaggtggtgattaaattt

SEQ ID NO: 1489 - DNA, 2328 bp, Artificial Sequence
  8HGO-ISY engineered fusion
atgtcttggtggtggaaaagatcaataggtgccggcaaaaatctcccgaaccaaaacaaagagaacggggtatgcaagtcgtacaaatcggtcgctctagttgtgggcgttactggtattgttggcagttccctagccgaagtccttaaattgcccgatacccctggtggtccgtggaaagtatatggtgtcgctaggcgtccatgtcctgtatggcttgccaagaaacctgttgagtacattcaatgtgatgtgtccgataatcaagaaaccatatcaaaattgagccccttgaaggatatcacccacattttctacgtatcttggatcggatctgaagactgccaaactaatgccacaatgttcaaaaatattctgaatagtgtcatacccaatgcttctaatttacagcatgtttgtctacaaaccggtattaaacattattttggcatatttgaagaaggttctaaagtagtgccgcatgattctccatttaccgaggatcttcccagattgaatgttccaaatttttaccacgacttagaggacatattatatgaggagacaggaaagaataacctcacgtggtctgtgcatagacctgcattagtattcggattttctccctgcagtatgatgaacattgtgagtactctttgcgtgtatgcgacaatttgcaagcatgagaataaggctttagtttacccagggagcaagaatagctggaactgttatgctgatgctgtagatgcagatttggtagccgaacatgaaatctgggcagccgtcgatccaaaagccaaaaatcaagtattaaattgcaacaatggggatgttttcaaatggaaacatatatggaagaaactggccgaggaattcggtattgaaatggtagggtatgttgaaggtaaagaacaagtctccttggcagagctaatgaaagataaggatcaagtttgggacgagattgtaaaaaaaaataacttagttcctactaagttgaaagaaatagcagctttttggtttgctgatattgcattttgctctgaaaatctaattagttcaatgaataagtccaaagaattgggatttttaggttttaggaacagtatgaagtcttttgtttcctgcattgataagatgagggactacagatttattccgggtggtggcgggagcggtggaggaggatcaatgacaaagactaacagtccagccccatcggttattacatgtaaagccgccgttgtctggaaaagcggagaacctccaaaagtggaggaaattcaggtcgaccctcccaaagcaagtgaagtccgtataaaaatgctgtgcgcttccttatgtcacactgattttttagcgtgcaatgggttgcctgtgccgttattccccagaatacctgggcatgaaggagtcggaatgattgagagcgttggtgagaatgtgacgaacctaaaggagggagatattgtaatgcctctttatctaggtgaatgcggagagtgtttaaactgtaaatccggtagaacaaacctatgtcacaaatatcccttgggtttttcaggacttcttttggacggtacatcacgtatgtccatcggcgaacaaaaggtctaccatcattttagctgctctacctggtcagagtatattgttatagaggcggcttacgctgttaaagtcgatccaagggtgtcacttccacatgcttcgtttctttgttgcggatttactaccgggtttggcgctacttggcgcgatgttaatgtcgttaaggggagcacggtggccgtcttgggcctcggtgcagtcggacttggtgcagtacaaggcgcgaaaagtcaaggcgcttcgagaatcattgggttggatataaatgataaaaagagagagaaaggcgaagcgtttggtatgactgaattcatcaacccgaaaggttcaaataagtctatttctgaattgattaacgaagccactggtggtttaggacttgactacgtgtatgagtgcactggcgtccctgccttattaaatgaagctattgagtcttccaaagtaggtctaggtaccgctgttttgattggggctggactagaaacaagtggtgaaattaaattcattcccttattatgtggtaggacagtaaagggtagtatatacggtggggtgagacctaagagtgaccttccgacattgattgagaagtgtataaataaggagattcctatggatgaactgatgacccacgaggtttctctcagcgaaataaacaaaggctttgaatatctaaagcatccagattgtgtaaaggtggtgattaaattt

SEQ ID NO: 1490 - DNA, 2343 bp, Artificial Sequence
  8HGO-ISY engineered fusion
atgtcttggtggtggaaaagatcaataggtgccggcaaaaatctcccgaaccaaaacaaagagaacggggtatgcaagtcgtacaaatcggtcgctctagttgtgggcgttactggtattgttggcagttccctagccgaagtccttaaattgcccgatacccctggtggtccgtggaaagtatatggtgtcgctaggcgtccatgtcctgtatggcttgccaagaaacctgttgagtacattcaatgtgatgtgtccgataatcaagaaaccatatcaaaattgagccccttgaaggatatcacccacattttctacgtatcttggatcggatctgaagactgccaaactaatgccacaatgttcaaaaatattctgaatagtgtcatacccaatgcttctaatttacagcatgtttgtctacaaaccggtattaaacattattttggcatatttgaagaaggttctaaagtagtgccgcatgattctccatttaccgaggatcttcccagattgaatgttccaaatttttaccacgacttagaggacatattatatgaggagacaggaaagaataacctcacgtggtctgtgcatagacctgcattagtattcggattttctccctgcagtatgatgaacattgtgagtactctttgcgtgtatgcgacaatttgcaagcatgagaataaggctttagtttacccagggagcaagaatagctggaactgttatgctgatgctgtagatgcagatttggtagccgaacatgaaatctgggcagccgtcgatccaaaagccaaaaatcaagtattaaattgcaacaatggggatgttttcaaatggaaacatatatggaagaaactggccgaggaattcggtattgaaatggtagggtatgttgaaggtaaagaacaagtctccttggcagagctaatgaaagataaggatcaagtttgggacgagattgtaaaaaaaaataacttagttcctactaagttgaaagaaatagcagctttttggtttgctgatattgcattttgctctgaaaatctaattagttcaatgaataagtccaaagaattgggatttttaggttttaggaacagtatgaagtcttttgtttcctgcattgataagatgagggactacagatttattccgggaggtggaggttccggtggaggtggaagtggcggtggagggtcaatgacaaagactaacagtccagccccatcggttattacatgtaaagccgccgttgtctggaaaagcggagaacctccaaaagtggaggaaattcaggtcgaccctcccaaagcaagtgaagtccgtataaaaatgctgtgcgcttccttatgtcacactgattttttagcgtgcaatgggttgcctgtgccgttattccccagaatacctgggcatgaaggagtcggaatgattgagagcgttggtgagaatgtgacgaacctaaaggagggagatattgtaatgcctctttatctaggtgaatgcggagagtgtttaaactgtaaatccggtagaacaaacctatgtcacaaatatcccttgggtttttcaggacttcttttggacggtacatcacgtatgtccatcggcgaacaaaaggtctaccatcattttagctgctctacctggtcagagtatattgttatagaggcggcttacgctgttaaagtcgatccaagggtgtcacttccacatgcttcgtttctttgttgcggatttactaccgggtttggcgctacttggcgcgatgttaatgtcgttaaggggagcacggtggccgtcttgggcctcggtgcagtcggacttggtgcagtacaaggcgcgaaaagtcaaggcgcttcgagaatcattgggttggatataaatgataaaaagagagagaaaggcgaagcgtttggtatgactgaattcatcaacccgaaaggttcaaataagtctatttctgaattgattaacgaagccactggtggtttaggacttgactacgtgtatgagtgcactggcgtccctgccttattaaatgaagctattgagtcttccaaagtaggtctaggtaccgctgttttgattggggctggactagaaacaagtggtgaaattaaattcattcccttattatgtggtaggacagtaaagggtagtatatacggtggggtgagacctaagagtgaccttccgacattgattgagaagtgtataaataaggagattcctatggatgaactgatgacccacgaggtttctctcagcgaaataaacaaaggctttgaatatctaaagcatccagattgtgtaaaggtggtgattaaattt

SEQ ID NO: 1491 - DNA, 2337 bp, Artificial Sequence
  8HGO-ISY engineered fusion
atgtcgctttcgtggtggagagccggagccgctaaaaagagaatggatgatgatgaatcccttttggttaaacaacagcagcagcaatgtgtggctctaattgttggcgtcaccgggttagtgggtaattcactagcagaaatgttaccactaccagatactccaggcgggccatggaaagtgtatggcgtagcaagacgggctcgtccttcatggaatgaagatcaaccaatgacatatatatcatgcgatgtcagtaacaccggcgaagtggaagccaaattatctcctttgtcagatgtaactcatattttttacgctacgtggacgtctagatccacagaggaggaaaattgtgaagcaaatggcaaaatgctcaaaaatgttctagatgcaatgataccgaattgccctaacttgaaacacatttgtctacaaaccggtagatttcattatgttgcttccgttgtagactggaagatcaatggatcacacgacaccccactaaccgaagacttgcccagattaaaaactaacaatttttattatacccaagaggacattcttttagaggaagttaagagaaaagaaggtcttacttggtcggttcatcgtccaggtacaatcttcggattctctccttattccatgatgaatctcgttggtacattatgcgtctatgctgccatatgtaaacaagaaggtgcagttttgcgatttcccggttgcaaaggtgcgtgggatggacattctgactgtgctgatgccgatttgatcgctgaacaacaaatatgggccgcattagacccgcatgctaagaaccaagctttcaatgtatcgaacggagatttattcaagtggaaacatttatggaaagttctcgccgaccaatttggtgtggagtgtggtgactatgaggaaggacaacagttgagattgcaagacgttatgaaagacaagggtcctgtttgggacaagatcgtggcagaaaacggactttctaacacaaagctcgaagacgtcggtaagtggtggttttccgacacaattttgtggaatgaatgtcgcttggattctatgaataaaagtaaagaacatgggttcttaggtttcagaaattcaaagaattgctttttgtactggatacataaagtcaaagcctacaatctcgtgccaagtacatatacgggcggtggatccggtatgacaaagactaacagtccagccccatcggttattacatgtaaagccgccgttgtctggaaaagcggagaacctccaaaagtggaggaaattcaggtcgaccctcccaaagcaagtgaagtccgtataaaaatgctgtgcgcttccttatgtcacactgattttttagcgtgcaatgggttgcctgtgccgttattccccagaatacctgggcatgaaggagtcggaatgattgagagcgttggtgagaatgtgacgaacctaaaggagggagatattgtaatgcctctttatctaggtgaatgcggagagtgtttaaactgtaaatccggtagaacaaacctatgtcacaaatatcccttgggtttttcaggacttcttttggacggtacatcacgtatgtccatcggcgaacaaaaggtctaccatcattttagctgctctacctggtcagagtatattgttatagaggcggcttacgctgttaaagtcgatccaagggtgtcacttccacatgcttcgtttctttgttgcggatttactaccgggtttggcgctacttggcgcgatgttaatgtcgttaaggggagcacggtggccgtcttgggcctcggtgcagtcggacttggtgcagtacaaggcgcgaaaagtcaaggcgcttcgagaatcattgggttggatataaatgataaaaagagagagaaaggcgaagcgtttggtatgactgaattcatcaacccgaaaggttcaaataagtctatttctgaattgattaacgaagccactggtggtttaggacttgactacgtgtatgagtgcactggcgtccctgccttattaaatgaagctattgagtcttccaaagtaggtctaggtaccgctgttttgattggggctggactagaaacaagtggtgaaattaaattcattcccttattatgtggtaggacagtaaagggtagtatatacggtggggtgagacctaagagtgaccttccgacattgattgagaagtgtataaataaggagattcctatggatgaactgatgacccacgaggtttctctcagcgaaataaacaaaggctttgaatatctaaagcatccagattgtgtaaaggtggtgattaaattt

SEQ ID NO: 1492 - DNA, 2352 bp, Artificial Sequence
  8HGO-ISY engineered fusion
atgtcgctttcgtggtggagagccggagccgctaaaaagagaatggatgatgatgaatcccttttggttaaacaacagcagcagcaatgtgtggctctaattgttggcgtcaccgggttagtgggtaattcactagcagaaatgttaccactaccagatactccaggcgggccatggaaagtgtatggcgtagcaagacgggctcgtccttcatggaatgaagatcaaccaatgacatatatatcatgcgatgtcagtaacaccggcgaagtggaagccaaattatctcctttgtcagatgtaactcatattttttacgctacgtggacgtctagatccacagaggaggaaaattgtgaagcaaatggcaaaatgctcaaaaatgttctagatgcaatgataccgaattgccctaacttgaaacacatttgtctacaaaccggtagatttcattatgttgcttccgttgtagactggaagatcaatggatcacacgacaccccactaaccgaagacttgcccagattaaaaactaacaatttttattatacccaagaggacattcttttagaggaagttaagagaaaagaaggtcttacttggtcggttcatcgtccaggtacaatcttcggattctctccttattccatgatgaatctcgttggtacattatgcgtctatgctgccatatgtaaacaagaaggtgcagttttgcgatttcccggttgcaaaggtgcgtgggatggacattctgactgtgctgatgccgatttgatcgctgaacaacaaatatgggccgcattagacccgcatgctaagaaccaagctttcaatgtatcgaacggagatttattcaagtggaaacatttatggaaagttctcgccgaccaatttggtgtggagtgtggtgactatgaggaaggacaacagttgagattgcaagacgttatgaaagacaagggtcctgtttgggacaagatcgtggcagaaaacggactttctaacacaaagctcgaagacgtcggtaagtggtggttttccgacacaattttgtggaatgaatgtcgcttggattctatgaataaaagtaaagaacatgggttcttaggtttcagaaattcaaagaattgctttttgtactggatacataaagtcaaagcctacaatctcgtgccaagtacatatacgggtggtggcgggagcggtggaggaggatcaatgacaaagactaacagtccagccccatcggttattacatgtaaagccgccgttgtctggaaaagcggagaacctccaaaagtggaggaaattcaggtcgaccctcccaaagcaagtgaagtccgtataaaaatgctgtgcgcttccttatgtcacactgattttttagcgtgcaatgggttgcctgtgccgttattccccagaatacctgggcatgaaggagtcggaatgattgagagcgttggtgagaatgtgacgaacctaaaggagggagatattgtaatgcctctttatctaggtgaatgcggagagtgtttaaactgtaaatccggtagaacaaacctatgtcacaaatatcccttgggtttttcaggacttcttttggacggtacatcacgtatgtccatcggcgaacaaaaggtctaccatcattttagctgctctacctggtcagagtatattgttatagaggcggcttacgctgttaaagtcgatccaagggtgtcacttccacatgcttcgtttctttgttgcggatttactaccgggtttggcgctacttggcgcgatgttaatgtcgttaaggggagcacggtggccgtcttgggcctcggtgcagtcggacttggtgcagtacaaggcgcgaaaagtcaaggcgcttcgagaatcattgggttggatataaatgataaaaagagagagaaaggcgaagcgtttggtatgactgaattcatcaacccgaaaggttcaaataagtctatttctgaattgattaacgaagccactggtggtttaggacttgactacgtgtatgagtgcactggcgtccctgccttattaaatgaagctattgagtcttccaaagtaggtctaggtaccgctgttttgattggggctggactagaaacaagtggtgaaattaaattcattcccttattatgtggtaggacagtaaagggtagtatatacggtggggtgagacctaagagtgaccttccgacattgattgagaagtgtataaataaggagattcctatggatgaactgatgacccacgaggtttctctcagcgaaataaacaaaggctttgaatatctaaagcatccagattgtgtaaaggtggtgattaaattt

SEQ ID NO: 1493 - DNA, 2367 bp, Artificial Sequence
  8HGO-ISY engineered fusion
atgtcgctttcgtggtggagagccggagccgctaaaaagagaatggatgatgatgaatcccttttggttaaacaacagcagcagcaatgtgtggctctaattgttggcgtcaccgggttagtgggtaattcactagcagaaatgttaccactaccagatactccaggcgggccatggaaagtgtatggcgtagcaagacgggctcgtccttcatggaatgaagatcaaccaatgacatatatatcatgcgatgtcagtaacaccggcgaagtggaagccaaattatctcctttgtcagatgtaactcatattttttacgctacgtggacgtctagatccacagaggaggaaaattgtgaagcaaatggcaaaatgctcaaaaatgttctagatgcaatgataccgaattgccctaacttgaaacacatttgtctacaaaccggtagatttcattatgttgcttccgttgtagactggaagatcaatggatcacacgacaccccactaaccgaagacttgcccagattaaaaactaacaatttttattatacccaagaggacattcttttagaggaagttaagagaaaagaaggtcttacttggtcggttcatcgtccaggtacaatcttcggattctctccttattccatgatgaatctcgttggtacattatgcgtctatgctgccatatgtaaacaagaaggtgcagttttgcgatttcccggttgcaaaggtgcgtgggatggacattctgactgtgctgatgccgatttgatcgctgaacaacaaatatgggccgcattagacccgcatgctaagaaccaagctttcaatgtatcgaacggagatttattcaagtggaaacatttatggaaagttctcgccgaccaatttggtgtggagtgtggtgactatgaggaaggacaacagttgagattgcaagacgttatgaaagacaagggtcctgtttgggacaagatcgtggcagaaaacggactttctaacacaaagctcgaagacgtcggtaagtggtggttttccgacacaattttgtggaatgaatgtcgcttggattctatgaataaaagtaaagaacatgggttcttaggtttcagaaattcaaagaattgctttttgtactggatacataaagtcaaagcctacaatctcgtgccaagtacatatacgggaggtggaggttccggtggaggtggaagtggcggtggagggtcaatgacaaagactaacagtccagccccatcggttattacatgtaaagccgccgttgtctggaaaagcggagaacctccaaaagtggaggaaattcaggtcgaccctcccaaagcaagtgaagtccgtataaaaatgctgtgcgcttccttatgtcacactgattttttagcgtgcaatgggttgcctgtgccgttattccccagaatacctgggcatgaaggagtcggaatgattgagagcgttggtgagaatgtgacgaacctaaaggagggagatattgtaatgcctctttatctaggtgaatgcggagagtgtttaaactgtaaatccggtagaacaaacctatgtcacaaatatcccttgggtttttcaggacttcttttggacggtacatcacgtatgtccatcggcgaacaaaaggtctaccatcattttagctgctctacctggtcagagtatattgttatagaggcggcttacgctgttaaagtcgatccaagggtgtcacttccacatgcttcgtttctttgttgcggatttactaccgggtttggcgctacttggcgcgatgttaatgtcgttaaggggagcacggtggccgtcttgggcctcggtgcagtcggacttggtgcagtacaaggcgcgaaaagtcaaggcgcttcgagaatcattgggttggatataaatgataaaaagagagagaaaggcgaagcgtttggtatgactgaattcatcaacccgaaaggttcaaataagtctatttctgaattgattaacgaagccactggtggtttaggacttgactacgtgtatgagtgcactggcgtccctgccttattaaatgaagctattgagtcttccaaagtaggtctaggtaccgctgttttgattggggctggactagaaacaagtggtgaaattaaattcattcccttattatgtggtaggacagtaaagggtagtatatacggtggggtgagacctaagagtgaccttccgacattgattgagaagtgtataaataaggagattcctatggatgaactgatgacccacgaggtttctctcagcgaaataaacaaaggctttgaatatctaaagcatccagattgtgtaaaggtggtgattaaattt

SEQ ID NO: 1494 - DNA, 1953 bp, Artificial Sequence
  ISY-NEPS engineered fusion
atgtcttggtggtggaaaagatcaataggtgccggcaaaaatctcccgaaccaaaacaaagagaacggggtatgcaagtcgtacaaatcggtcgctctagttgtgggcgttactggtattgttggcagttccctagccgaagtccttaaattgcccgatacccctggtggtccgtggaaagtatatggtgtcgctaggcgtccatgtcctgtatggcttgccaagaaacctgttgagtacattcaatgtgatgtgtccgataatcaagaaaccatatcaaaattgagccccttgaaggatatcacccacattttctacgtatcttggatcggatctgaagactgccaaactaatgccacaatgttcaaaaatattctgaatagtgtcatacccaatgcttctaatttacagcatgtttgtctacaaaccggtattaaacattattttggcatatttgaagaaggttctaaagtagtgccgcatgattctccatttaccgaggatcttcccagattgaatgttccaaatttttaccacgacttagaggacatattatatgaggagacaggaaagaataacctcacgtggtctgtgcatagacctgcattagtattcggattttctccctgcagtatgatgaacattgtgagtactctttgcgtgtatgcgacaatttgcaagcatgagaataaggctttagtttacccagggagcaagaatagctggaactgttatgctgatgctgtagatgcagatttggtagccgaacatgaaatctgggcagccgtcgatccaaaagccaaaaatcaagtattaaattgcaacaatggggatgttttcaaatggaaacatatatggaagaaactggccgaggaattcggtattgaaatggtagggtatgttgaaggtaaagaacaagtctccttggcagagctaatgaaagataaggatcaagtttgggacgagattgtaaaaaaaaataacttagttcctactaagttgaaagaaatagcagctttttggtttgctgatattgcattttgctctgaaaatctaattagttcaatgaataagtccaaagaattgggatttttaggttttaggaacagtatgaagtcttttgtttcctgcattgataagatgagggactacagatttattccgggcggtggatccggtatggaagtaatgaaacacttcgttaccgttcacggtgtgggccacggggcctgggtatactataagttaaagcccaggatcgaggcagctggtcacaggtgtaccgcagtgaacctggctgcgtccggaatcaacgaaaaaaaactagaggaagtaaggtcaagtatagactatgcagccccactgcttgaggttttggactccgtgcccgaaaacgagaaagttatcctagtcggccattcaggcggaggaatgaccgcagcagtaggtatggagaagtttccgaacaagatcagtctggccgtatttctgaacgccataatgcctgacactgaaaaccgtcctagttacgttctggaagagtatacggccaaaacacctcccgaggcttggaaggactgccagttctcagcctacggggatccaccaatcacttctttggtatgtggtcctgagttcatttcttcaaccctataccatttgagccccattgaggatcacgcgctgggaaaaattctagttaggcccggttctctttttattgaggacctactgaaggctgaaaagttcacagaggagggtttcggtagtgtgcctcgtgtctatgtgatagcggctgaagacaagaccattcctccggaatttcaaaggtggatgattgaaaataatcctgttaaggaagtcaaagaaatcaaaggggcggaccacatgccgatgttctccaaacccgacgaactgagccaatgcttacttgacatagcaaagaaacacgca

SEQ ID NO: 1495 - DNA, 1968 bp, Artificial Sequence
  ISY-NEPS engineered fusion
atgtcttggtggtggaaaagatcaataggtgccggcaaaaatctcccgaaccaaaacaaagagaacggggtatgcaagtcgtacaaatcggtcgctctagttgtgggcgttactggtattgttggcagttccctagccgaagtccttaaattgcccgatacccctggtggtccgtggaaagtatatggtgtcgctaggcgtccatgtcctgtatggcttgccaagaaacctgttgagtacattcaatgtgatgtgtccgataatcaagaaaccatatcaaaattgagccccttgaaggatatcacccacattttctacgtatcttggatcggatctgaagactgccaaactaatgccacaatgttcaaaaatattctgaatagtgtcatacccaatgcttctaatttacagcatgtttgtctacaaaccggtattaaacattattttggcatatttgaagaaggttctaaagtagtgccgcatgattctccatttaccgaggatcttcccagattgaatgttccaaatttttaccacgacttagaggacatattatatgaggagacaggaaagaataacctcacgtggtctgtgcatagacctgcattagtattcggattttctccctgcagtatgatgaacattgtgagtactctttgcgtgtatgcgacaatttgcaagcatgagaataaggctttagtttacccagggagcaagaatagctggaactgttatgctgatgctgtagatgcagatttggtagccgaacatgaaatctgggcagccgtcgatccaaaagccaaaaatcaagtattaaattgcaacaatggggatgttttcaaatggaaacatatatggaagaaactggccgaggaattcggtattgaaatggtagggtatgttgaaggtaaagaacaagtctccttggcagagctaatgaaagataaggatcaagtttgggacgagattgtaaaaaaaaataacttagttcctactaagttgaaagaaatagcagctttttggtttgctgatattgcattttgctctgaaaatctaattagttcaatgaataagtccaaagaattgggatttttaggttttaggaacagtatgaagtcttttgtttcctgcattgataagatgagggactacagatttattccgggtggtggcgggagcggtggaggaggatcaatggaagtaatgaaacacttcgttaccgttcacggtgtgggccacggggcctgggtatactataagttaaagcccaggatcgaggcagctggtcacaggtgtaccgcagtgaacctggctgcgtccggaatcaacgaaaaaaaactagaggaagtaaggtcaagtatagactatgcagccccactgcttgaggttttggactccgtgcccgaaaacgagaaagttatcctagtcggccattcaggcggaggaatgaccgcagcagtaggtatggagaagtttccgaacaagatcagtctggccgtatttctgaacgccataatgcctgacactgaaaaccgtcctagttacgttctggaagagtatacggccaaaacacctcccgaggcttggaaggactgccagttctcagcctacggggatccaccaatcacttctttggtatgtggtcctgagttcatttcttcaaccctataccatttgagccccattgaggatcacgcgctgggaaaaattctagttaggcccggttctctttttattgaggacctactgaaggctgaaaagttcacagaggagggtttcggtagtgtgcctcgtgtctatgtgatagcggctgaagacaagaccattcctccggaatttcaaaggtggatgattgaaaataatcctgttaaggaagtcaaagaaatcaaaggggcggaccacatgccgatgttctccaaacccgacgaactgagccaatgcttacttgacatagcaaagaaacacgca

SEQ ID NO: 1496 - DNA, 1983 bp, Artificial Sequence
  ISY-NEPS engineered fusion
atgtcttggtggtggaaaagatcaataggtgccggcaaaaatctcccgaaccaaaacaaagagaacggggtatgcaagtcgtacaaatcggtcgctctagttgtgggcgttactggtattgttggcagttccctagccgaagtccttaaattgcccgatacccctggtggtccgtggaaagtatatggtgtcgctaggcgtccatgtcctgtatggcttgccaagaaacctgttgagtacattcaatgtgatgtgtccgataatcaagaaaccatatcaaaattgagccccttgaaggatatcacccacattttctacgtatcttggatcggatctgaagactgccaaactaatgccacaatgttcaaaaatattctgaatagtgtcatacccaatgcttctaatttacagcatgtttgtctacaaaccggtattaaacattattttggcatatttgaagaaggttctaaagtagtgccgcatgattctccatttaccgaggatcttcccagattgaatgttccaaatttttaccacgacttagaggacatattatatgaggagacaggaaagaataacctcacgtggtctgtgcatagacctgcattagtattcggattttctccctgcagtatgatgaacattgtgagtactctttgcgtgtatgcgacaatttgcaagcatgagaataaggctttagtttacccagggagcaagaatagctggaactgttatgctgatgctgtagatgcagatttggtagccgaacatgaaatctgggcagccgtcgatccaaaagccaaaaatcaagtattaaattgcaacaatggggatgttttcaaatggaaacatatatggaagaaactggccgaggaattcggtattgaaatggtagggtatgttgaaggtaaagaacaagtctccttggcagagctaatgaaagataaggatcaagtttgggacgagattgtaaaaaaaaataacttagttcctactaagttgaaagaaatagcagctttttggtttgctgatattgcattttgctctgaaaatctaattagttcaatgaataagtccaaagaattgggatttttaggttttaggaacagtatgaagtcttttgtttcctgcattgataagatgagggactacagatttattccgggaggtggaggttccggtggaggtggaagtggcggtggagggtcaatggaagtaatgaaacacttcgttaccgttcacggtgtgggccacggggcctgggtatactataagttaaagcccaggatcgaggcagctggtcacaggtgtaccgcagtgaacctggctgcgtccggaatcaacgaaaaaaaactagaggaagtaaggtcaagtatagactatgcagccccactgcttgaggttttggactccgtgcccgaaaacgagaaagttatcctagtcggccattcaggcggaggaatgaccgcagcagtaggtatggagaagtttccgaacaagatcagtctggccgtatttctgaacgccataatgcctgacactgaaaaccgtcctagttacgttctggaagagtatacggccaaaacacctcccgaggcttggaaggactgccagttctcagcctacggggatccaccaatcacttctttggtatgtggtcctgagttcatttcttcaaccctataccatttgagccccattgaggatcacgcgctgggaaaaattctagttaggcccggttctctttttattgaggacctactgaaggctgaaaagttcacagaggagggtttcggtagtgtgcctcgtgtctatgtgatagcggctgaagacaagaccattcctccggaatttcaaaggtggatgattgaaaataatcctgttaaggaagtcaaagaaatcaaaggggcggaccacatgccgatgttctccaaacccgacgaactgagccaatgcttacttgacatagcaaagaaacacgca

SEQ ID NO: 1497 - DNA, 1977 bp, Artificial Sequence
  ISY-NEPS engineered fusion
atgtcgctttcgtggtggagagccggagccgctaaaaagagaatggatgatgatgaatcccttttggttaaacaacagcagcagcaatgtgtggctctaattgttggcgtcaccgggttagtgggtaattcactagcagaaatgttaccactaccagatactccaggcgggccatggaaagtgtatggcgtagcaagacgggctcgtccttcatggaatgaagatcaaccaatgacatatatatcatgcgatgtcagtaacaccggcgaagtggaagccaaattatctcctttgtcagatgtaactcatattttttacgctacgtggacgtctagatccacagaggaggaaaattgtgaagcaaatggcaaaatgctcaaaaatgttctagatgcaatgataccgaattgccctaacttgaaacacatttgtctacaaaccggtagatttcattatgttgcttccgttgtagactggaagatcaatggatcacacgacaccccactaaccgaagacttgcccagattaaaaactaacaatttttattatacccaagaggacattcttttagaggaagttaagagaaaagaaggtcttacttggtcggttcatcgtccaggtacaatcttcggattctctccttattccatgatgaatctcgttggtacattatgcgtctatgctgccatatgtaaacaagaaggtgcagttttgcgatttcccggttgcaaaggtgcgtgggatggacattctgactgtgctgatgccgatttgatcgctgaacaacaaatatgggccgcattagacccgcatgctaagaaccaagctttcaatgtatcgaacggagatttattcaagtggaaacatttatggaaagttctcgccgaccaatttggtgtggagtgtggtgactatgaggaaggacaacagttgagattgcaagacgttatgaaagacaagggtcctgtttgggacaagatcgtggcagaaaacggactttctaacacaaagctcgaagacgtcggtaagtggtggttttccgacacaattttgtggaatgaatgtcgcttggattctatgaataaaagtaaagaacatgggttcttaggtttcagaaattcaaagaattgctttttgtactggatacataaagtcaaagcctacaatctcgtgccaagtacatatacgggcggtggatccggtatggaagtaatgaaacacttcgttaccgttcacggtgtgggccacggggcctgggtatactataagttaaagcccaggatcgaggcagctggtcacaggtgtaccgcagtgaacctggctgcgtccggaatcaacgaaaaaaaactagaggaagtaaggtcaagtatagactatgcagccccactgcttgaggttttggactccgtgcccgaaaacgagaaagttatcctagtcggccattcaggcggaggaatgaccgcagcagtaggtatggagaagtttccgaacaagatcagtctggccgtatttctgaacgccataatgcctgacactgaaaaccgtcctagttacgttctggaagagtatacggccaaaacacctcccgaggcttggaaggactgccagttctcagcctacggggatccaccaatcacttctttggtatgtggtcctgagttcatttcttcaaccctataccatttgagccccattgaggatcacgcgctgggaaaaattctagttaggcccggttctctttttattgaggacctactgaaggctgaaaagttcacagaggagggtttcggtagtgtgcctcgtgtctatgtgatagcggctgaagacaagaccattcctccggaatttcaaaggtggatgattgaaaataatcctgttaaggaagtcaaagaaatcaaaggggcggaccacatgccgatgttctccaaacccgacgaactgagccaatgcttacttgacatagcaaagaaacacgca

SEQ ID NO: 1498 - DNA, 1992 bp, Artificial Sequence
  ISY-NEPS engineered fusion
atgtcgctttcgtggtggagagccggagccgctaaaaagagaatggatgatgatgaatcccttttggttaaacaacagcagcagcaatgtgtggctctaattgttggcgtcaccgggttagtgggtaattcactagcagaaatgttaccactaccagatactccaggcgggccatggaaagtgtatggcgtagcaagacgggctcgtccttcatggaatgaagatcaaccaatgacatatatatcatgcgatgtcagtaacaccggcgaagtggaagccaaattatctcctttgtcagatgtaactcatattttttacgctacgtggacgtctagatccacagaggaggaaaattgtgaagcaaatggcaaaatgctcaaaaatgttctagatgcaatgataccgaattgccctaacttgaaacacatttgtctacaaaccggtagatttcattatgttgcttccgttgtagactggaagatcaatggatcacacgacaccccactaaccgaagacttgcccagattaaaaactaacaatttttattatacccaagaggacattcttttagaggaagttaagagaaaagaaggtcttacttggtcggttcatcgtccaggtacaatcttcggattctctccttattccatgatgaatctcgttggtacattatgcgtctatgctgccatatgtaaacaagaaggtgcagttttgcgatttcccggttgcaaaggtgcgtgggatggacattctgactgtgctgatgccgatttgatcgctgaacaacaaatatgggccgcattagacccgcatgctaagaaccaagctttcaatgtatcgaacggagatttattcaagtggaaacatttatggaaagttctcgccgaccaatttggtgtggagtgtggtgactatgaggaaggacaacagttgagattgcaagacgttatgaaagacaagggtcctgtttgggacaagatcgtggcagaaaacggactttctaacacaaagctcgaagacgtcggtaagtggtggttttccgacacaattttgtggaatgaatgtcgcttggattctatgaataaaagtaaagaacatgggttcttaggtttcagaaattcaaagaattgctttttgtactggatacataaagtcaaagcctacaatctcgtgccaagtacatatacgggtggtggcgggagcggtggaggaggatcaatggaagtaatgaaacacttcgttaccgttcacggtgtgggccacggggcctgggtatactataagttaaagcccaggatcgaggcagctggtcacaggtgtaccgcagtgaacctggctgcgtccggaatcaacgaaaaaaaactagaggaagtaaggtcaagtatagactatgcagccccactgcttgaggttttggactccgtgcccgaaaacgagaaagttatcctagtcggccattcaggcggaggaatgaccgcagcagtaggtatggagaagtttccgaacaagatcagtctggccgtatttctgaacgccataatgcctgacactgaaaaccgtcctagttacgttctggaagagtatacggccaaaacacctcccgaggcttggaaggactgccagttctcagcctacggggatccaccaatcacttctttggtatgtggtcctgagttcatttcttcaaccctataccatttgagccccattgaggatcacgcgctgggaaaaattctagttaggcccggttctctttttattgaggacctactgaaggctgaaaagttcacagaggagggtttcggtagtgtgcctcgtgtctatgtgatagcggctgaagacaagaccattcctccggaatttcaaaggtggatgattgaaaataatcctgttaaggaagtcaaagaaatcaaaggggcggaccacatgccgatgttctccaaacccgacgaactgagccaatgcttacttgacatagcaaagaaacacgca

SEQ ID NO: 1499 - DNA, 2007 bp, Artificial Sequence
  ISY-NEPS engineered fusion
atgtcgctttcgtggtggagagccggagccgctaaaaagagaatggatgatgatgaatcccttttggttaaacaacagcagcagcaatgtgtggctctaattgttggcgtcaccgggttagtgggtaattcactagcagaaatgttaccactaccagatactccaggcgggccatggaaagtgtatggcgtagcaagacgggctcgtccttcatggaatgaagatcaaccaatgacatatatatcatgcgatgtcagtaacaccggcgaagtggaagccaaattatctcctttgtcagatgtaactcatattttttacgctacgtggacgtctagatccacagaggaggaaaattgtgaagcaaatggcaaaatgctcaaaaatgttctagatgcaatgataccgaattgccctaacttgaaacacatttgtctacaaaccggtagatttcattatgttgcttccgttgtagactggaagatcaatggatcacacgacaccccactaaccgaagacttgcccagattaaaaactaacaatttttattatacccaagaggacattcttttagaggaagttaagagaaaagaaggtcttacttggtcggttcatcgtccaggtacaatcttcggattctctccttattccatgatgaatctcgttggtacattatgcgtctatgctgccatatgtaaacaagaaggtgcagttttgcgatttcccggttgcaaaggtgcgtgggatggacattctgactgtgctgatgccgatttgatcgctgaacaacaaatatgggccgcattagacccgcatgctaagaaccaagctttcaatgtatcgaacggagatttattcaagtggaaacatttatggaaagttctcgccgaccaatttggtgtggagtgtggtgactatgaggaaggacaacagttgagattgcaagacgttatgaaagacaagggtcctgtttgggacaagatcgtggcagaaaacggactttctaacacaaagctcgaagacgtcggtaagtggtggttttccgacacaattttgtggaatgaatgtcgcttggattctatgaataaaagtaaagaacatgggttcttaggtttcagaaattcaaagaattgctttttgtactggatacataaagtcaaagcctacaatctcgtgccaagtacatatacgggaggtggaggttccggtggaggtggaagtggcggtggagggtcaatggaagtaatgaaacacttcgttaccgttcacggtgtgggccacggggcctgggtatactataagttaaagcccaggatcgaggcagctggtcacaggtgtaccgcagtgaacctggctgcgtccggaatcaacgaaaaaaaactagaggaagtaaggtcaagtatagactatgcagccccactgcttgaggttttggactccgtgcccgaaaacgagaaagttatcctagtcggccattcaggcggaggaatgaccgcagcagtaggtatggagaagtttccgaacaagatcagtctggccgtatttctgaacgccataatgcctgacactgaaaaccgtcctagttacgttctggaagagtatacggccaaaacacctcccgaggcttggaaggactgccagttctcagcctacggggatccaccaatcacttctttggtatgtggtcctgagttcatttcttcaaccctataccatttgagccccattgaggatcacgcgctgggaaaaattctagttaggcccggttctctttttattgaggacctactgaaggctgaaaagttcacagaggagggtttcggtagtgtgcctcgtgtctatgtgatagcggctgaagacaagaccattcctccggaatttcaaaggtggatgattgaaaataatcctgttaaggaagtcaaagaaatcaaaggggcggaccacatgccgatgttctccaaacccgacgaactgagccaatgcttacttgacatagcaaagaaacacgca

SEQ ID NO: 1500 - DNA, 1953 bp, Artificial Sequence
  ISY-NEPS engineered fusion
atggaagtaatgaaacacttcgttaccgttcacggtgtgggccacggggcctgggtatactataagttaaagcccaggatcgaggcagctggtcacaggtgtaccgcagtgaacctggctgcgtccggaatcaacgaaaaaaaactagaggaagtaaggtcaagtatagactatgcagccccactgcttgaggttttggactccgtgcccgaaaacgagaaagttatcctagtcggccattcaggcggaggaatgaccgcagcagtaggtatggagaagtttccgaacaagatcagtctggccgtatttctgaacgccataatgcctgacactgaaaaccgtcctagttacgttctggaagagtatacggccaaaacacctcccgaggcttggaaggactgccagttctcagcctacggggatccaccaatcacttctttggtatgtggtcctgagttcatttcttcaaccctataccatttgagccccattgaggatcacgcgctgggaaaaattctagttaggcccggttctctttttattgaggacctactgaaggctgaaaagttcacagaggagggtttcggtagtgtgcctcgtgtctatgtgatagcggctgaagacaagaccattcctccggaatttcaaaggtggatgattgaaaataatcctgttaaggaagtcaaagaaatcaaaggggcggaccacatgccgatgttctccaaacccgacgaactgagccaatgcttacttgacatagcaaagaaacacgcaggcggtggatccggtatgtcttggtggtggaaaagatcaataggtgccggcaaaaatctcccgaaccaaaacaaagagaacggggtatgcaagtcgtacaaatcggtcgctctagttgtgggcgttactggtattgttggcagttccctagccgaagtccttaaattgcccgatacccctggtggtccgtggaaagtatatggtgtcgctaggcgtccatgtcctgtatggcttgccaagaaacctgttgagtacattcaatgtgatgtgtccgataatcaagaaaccatatcaaaattgagccccttgaaggatatcacccacattttctacgtatcttggatcggatctgaagactgccaaactaatgccacaatgttcaaaaatattctgaatagtgtcatacccaatgcttctaatttacagcatgtttgtctacaaaccggtattaaacattattttggcatatttgaagaaggttctaaagtagtgccgcatgattctccatttaccgaggatcttcccagattgaatgttccaaatttttaccacgacttagaggacatattatatgaggagacaggaaagaataacctcacgtggtctgtgcatagacctgcattagtattcggattttctccctgcagtatgatgaacattgtgagtactctttgcgtgtatgcgacaatttgcaagcatgagaataaggctttagtttacccagggagcaagaatagctggaactgttatgctgatgctgtagatgcagatttggtagccgaacatgaaatctgggcagccgtcgatccaaaagccaaaaatcaagtattaaattgcaacaatggggatgttttcaaatggaaacatatatggaagaaactggccgaggaattcggtattgaaatggtagggtatgttgaaggtaaagaacaagtctccttggcagagctaatgaaagataaggatcaagtttgggacgagattgtaaaaaaaaataacttagttcctactaagttgaaagaaatagcagctttttggtttgctgatattgcattttgctctgaaaatctaattagttcaatgaataagtccaaagaattgggatttttaggttttaggaacagtatgaagtcttttgtttcctgcattgataagatgagggactacagatttattccg

SEQ ID NO: 1501 - DNA, 1977 bp, Artificial Sequence
  ISY-NEPS engineered fusion
atggaagtaatgaaacacttcgttaccgttcacggtgtgggccacggggcctgggtatactataagttaaagcccaggatcgaggcagctggtcacaggtgtaccgcagtgaacctggctgcgtccggaatcaacgaaaaaaaactagaggaagtaaggtcaagtatagactatgcagccccactgcttgaggttttggactccgtgcccgaaaacgagaaagttatcctagtcggccattcaggcggaggaatgaccgcagcagtaggtatggagaagtttccgaacaagatcagtctggccgtatttctgaacgccataatgcctgacactgaaaaccgtcctagttacgttctggaagagtatacggccaaaacacctcccgaggcttggaaggactgccagttctcagcctacggggatccaccaatcacttctttggtatgtggtcctgagttcatttcttcaaccctataccatttgagccccattgaggatcacgcgctgggaaaaattctagttaggcccggttctctttttattgaggacctactgaaggctgaaaagttcacagaggagggtttcggtagtgtgcctcgtgtctatgtgatagcggctgaagacaagaccattcctccggaatttcaaaggtggatgattgaaaataatcctgttaaggaagtcaaagaaatcaaaggggcggaccacatgccgatgttctccaaacccgacgaactgagccaatgcttacttgacatagcaaagaaacacgcaggcggtggatccggtatgtcgctttcgtggtggagagccggagccgctaaaaagagaatggatgatgatgaatcccttttggttaaacaacagcagcagcaatgtgtggctctaattgttggcgtcaccgggttagtgggtaattcactagcagaaatgttaccactaccagatactccaggcgggccatggaaagtgtatggcgtagcaagacgggctcgtccttcatggaatgaagatcaaccaatgacatatatatcatgcgatgtcagtaacaccggcgaagtggaagccaaattatctcctttgtcagatgtaactcatattttttacgctacgtggacgtctagatccacagaggaggaaaattgtgaagcaaatggcaaaatgctcaaaaatgttctagatgcaatgataccgaattgccctaacttgaaacacatttgtctacaaaccggtagatttcattatgttgcttccgttgtagactggaagatcaatggatcacacgacaccccactaaccgaagacttgcccagattaaaaactaacaatttttattatacccaagaggacattcttttagaggaagttaagagaaaagaaggtcttacttggtcggttcatcgtccaggtacaatcttcggattctctccttattccatgatgaatctcgttggtacattatgcgtctatgctgccatatgtaaacaagaaggtgcagttttgcgatttcccggttgcaaaggtgcgtgggatggacattctgactgtgctgatgccgatttgatcgctgaacaacaaatatgggccgcattagacccgcatgctaagaaccaagctttcaatgtatcgaacggagatttattcaagtggaaacatttatggaaagttctcgccgaccaatttggtgtggagtgtggtgactatgaggaaggacaacagttgagattgcaagacgttatgaaagacaagggtcctgtttgggacaagatcgtggcagaaaacggactttctaacacaaagctcgaagacgtcggtaagtggtggttttccgacacaattttgtggaatgaatgtcgcttggattctatgaataaaagtaaagaacatgggttcttaggtttcagaaattcaaagaattgctttttgtactggatacataaagtcaaagcctacaatctcgtgccaagtacatatacg

SEQ ID NO: 1502 - DNA, 1968 bp, Artificial Sequence
  ISY-NEPS engineered fusion
atggaagtaatgaaacacttcgttaccgttcacggtgtgggccacggggcctgggtatactataagttaaagcccaggatcgaggcagctggtcacaggtgtaccgcagtgaacctggctgcgtccggaatcaacgaaaaaaaactagaggaagtaaggtcaagtatagactatgcagccccactgcttgaggttttggactccgtgcccgaaaacgagaaagttatcctagtcggccattcaggcggaggaatgaccgcagcagtaggtatggagaagtttccgaacaagatcagtctggccgtatttctgaacgccataatgcctgacactgaaaaccgtcctagttacgttctggaagagtatacggccaaaacacctcccgaggcttggaaggactgccagttctcagcctacggggatccaccaatcacttctttggtatgtggtcctgagttcatttcttcaaccctataccatttgagccccattgaggatcacgcgctgggaaaaattctagttaggcccggttctctttttattgaggacctactgaaggctgaaaagttcacagaggagggtttcggtagtgtgcctcgtgtctatgtgatagcggctgaagacaagaccattcctccggaatttcaaaggtggatgattgaaaataatcctgttaaggaagtcaaagaaatcaaaggggcggaccacatgccgatgttctccaaacccgacgaactgagccaatgcttacttgacatagcaaagaaacacgcaggtggtggcgggagcggtggaggaggatcaatgtcttggtggtggaaaagatcaataggtgccggcaaaaatctcccgaaccaaaacaaagagaacggggtatgcaagtcgtacaaatcggtcgctctagttgtgggcgttactggtattgttggcagttccctagccgaagtccttaaattgcccgatacccctggtggtccgtggaaagtatatggtgtcgctaggcgtccatgtcctgtatggcttgccaagaaacctgttgagtacattcaatgtgatgtgtccgataatcaagaaaccatatcaaaattgagccccttgaaggatatcacccacattttctacgtatcttggatcggatctgaagactgccaaactaatgccacaatgttcaaaaatattctgaatagtgtcatacccaatgcttctaatttacagcatgtttgtctacaaaccggtattaaacattattttggcatatttgaagaaggttctaaagtagtgccgcatgattctccatttaccgaggatcttcccagattgaatgttccaaatttttaccacgacttagaggacatattatatgaggagacaggaaagaataacctcacgtggtctgtgcatagacctgcattagtattcggattttctccctgcagtatgatgaacattgtgagtactctttgcgtgtatgcgacaatttgcaagcatgagaataaggctttagtttacccagggagcaagaatagctggaactgttatgctgatgctgtagatgcagatttggtagccgaacatgaaatctgggcagccgtcgatccaaaagccaaaaatcaagtattaaattgcaacaatggggatgttttcaaatggaaacatatatggaagaaactggccgaggaattcggtattgaaatggtagggtatgttgaaggtaaagaacaagtctccttggcagagctaatgaaagataaggatcaagtttgggacgagattgtaaaaaaaaataacttagttcctactaagttgaaagaaatagcagctttttggtttgctgatattgcattttgctctgaaaatctaattagttcaatgaataagtccaaagaattgggatttttaggttttaggaacagtatgaagtcttttgtttcctgcattgataagatgagggactacagatttattccg

SEQ ID NO: 1503 - DNA, 1992 bp, Artificial Sequence
  ISY-NEPS engineered fusion
atggaagtaatgaaacacttcgttaccgttcacggtgtgggccacggggcctgggtatactataagttaaagcccaggatcgaggcagctggtcacaggtgtaccgcagtgaacctggctgcgtccggaatcaacgaaaaaaaactagaggaagtaaggtcaagtatagactatgcagccccactgcttgaggttttggactccgtgcccgaaaacgagaaagttatcctagtcggccattcaggcggaggaatgaccgcagcagtaggtatggagaagtttccgaacaagatcagtctggccgtatttctgaacgccataatgcctgacactgaaaaccgtcctagttacgttctggaagagtatacggccaaaacacctcccgaggcttggaaggactgccagttctcagcctacggggatccaccaatcacttctttggtatgtggtcctgagttcatttcttcaaccctataccatttgagccccattgaggatcacgcgctgggaaaaattctagttaggcccggttctctttttattgaggacctactgaaggctgaaaagttcacagaggagggtttcggtagtgtgcctcgtgtctatgtgatagcggctgaagacaagaccattcctccggaatttcaaaggtggatgattgaaaataatcctgttaaggaagtcaaagaaatcaaaggggcggaccacatgccgatgttctccaaacccgacgaactgagccaatgcttacttgacatagcaaagaaacacgcaggtggtggcgggagcggtggaggaggatcaatgtcgctttcgtggtggagagccggagccgctaaaaagagaatggatgatgatgaatcccttttggttaaacaacagcagcagcaatgtgtggctctaattgttggcgtcaccgggttagtgggtaattcactagcagaaatgttaccactaccagatactccaggcgggccatggaaagtgtatggcgtagcaagacgggctcgtccttcatggaatgaagatcaaccaatgacatatatatcatgcgatgtcagtaacaccggcgaagtggaagccaaattatctcctttgtcagatgtaactcatattttttacgctacgtggacgtctagatccacagaggaggaaaattgtgaagcaaatggcaaaatgctcaaaaatgttctagatgcaatgataccgaattgccctaacttgaaacacatttgtctacaaaccggtagatttcattatgttgcttccgttgtagactggaagatcaatggatcacacgacaccccactaaccgaagacttgcccagattaaaaactaacaatttttattatacccaagaggacattcttttagaggaagttaagagaaaagaaggtcttacttggtcggttcatcgtccaggtacaatcttcggattctctccttattccatgatgaatctcgttggtacattatgcgtctatgctgccatatgtaaacaagaaggtgcagttttgcgatttcccggttgcaaaggtgcgtgggatggacattctgactgtgctgatgccgatttgatcgctgaacaacaaatatgggccgcattagacccgcatgctaagaaccaagctttcaatgtatcgaacggagatttattcaagtggaaacatttatggaaagttctcgccgaccaatttggtgtggagtgtggtgactatgaggaaggacaacagttgagattgcaagacgttatgaaagacaagggtcctgtttgggacaagatcgtggcagaaaacggactttctaacacaaagctcgaagacgtcggtaagtggtggttttccgacacaattttgtggaatgaatgtcgcttggattctatgaataaaagtaaagaacatgggttcttaggtttcagaaattcaaagaattgctttttgtactggatacataaagtcaaagcctacaatctcgtgccaagtacatatacg

SEQ ID NO: 1504 - DNA, 1983 bp, Artificial Sequence
  ISY-NEPS engineered fusion
atggaagtaatgaaacacttcgttaccgttcacggtgtgggccacggggcctgggtatactataagttaaagcccaggatcgaggcagctggtcacaggtgtaccgcagtgaacctggctgcgtccggaatcaacgaaaaaaaactagaggaagtaaggtcaagtatagactatgcagccccactgcttgaggttttggactccgtgcccgaaaacgagaaagttatcctagtcggccattcaggcggaggaatgaccgcagcagtaggtatggagaagtttccgaacaagatcagtctggccgtatttctgaacgccataatgcctgacactgaaaaccgtcctagttacgttctggaagagtatacggccaaaacacctcccgaggcttggaaggactgccagttctcagcctacggggatccaccaatcacttctttggtatgtggtcctgagttcatttcttcaaccctataccatttgagccccattgaggatcacgcgctgggaaaaattctagttaggcccggttctctttttattgaggacctactgaaggctgaaaagttcacagaggagggtttcggtagtgtgcctcgtgtctatgtgatagcggctgaagacaagaccattcctccggaatttcaaaggtggatgattgaaaataatcctgttaaggaagtcaaagaaatcaaaggggcggaccacatgccgatgttctccaaacccgacgaactgagccaatgcttacttgacatagcaaagaaacacgcaggaggtggaggttccggtggaggtggaagtggcggtggagggtcaatgtcttggtggtggaaaagatcaataggtgccggcaaaaatctcccgaaccaaaacaaagagaacggggtatgcaagtcgtacaaatcggtcgctctagttgtgggcgttactggtattgttggcagttccctagccgaagtccttaaattgcccgatacccctggtggtccgtggaaagtatatggtgtcgctaggcgtccatgtcctgtatggcttgccaagaaacctgttgagtacattcaatgtgatgtgtccgataatcaagaaaccatatcaaaattgagccccttgaaggatatcacccacattttctacgtatcttggatcggatctgaagactgccaaactaatgccacaatgttcaaaaatattctgaatagtgtcatacccaatgcttctaatttacagcatgtttgtctacaaaccggtattaaacattattttggcatatttgaagaaggttctaaagtagtgccgcatgattctccatttaccgaggatcttcccagattgaatgttccaaatttttaccacgacttagaggacatattatatgaggagacaggaaagaataacctcacgtggtctgtgcatagacctgcattagtattcggattttctccctgcagtatgatgaacattgtgagtactctttgcgtgtatgcgacaatttgcaagcatgagaataaggctttagtttacccagggagcaagaatagctggaactgttatgctgatgctgtagatgcagatttggtagccgaacatgaaatctgggcagccgtcgatccaaaagccaaaaatcaagtattaaattgcaacaatggggatgttttcaaatggaaacatatatggaagaaactggccgaggaattcggtattgaaatggtagggtatgttgaaggtaaagaacaagtctccttggcagagctaatgaaagataaggatcaagtttgggacgagattgtaaaaaaaaataacttagttcctactaagttgaaagaaatagcagctttttggtttgctgatattgcattttgctctgaaaatctaattagttcaatgaataagtccaaagaattgggatttttaggttttaggaacagtatgaagtcttttgtttcctgcattgataagatgagggactacagatttattccg

SEQ ID NO: 1505 - DNA, 2007 bp, Artificial Sequence
  ISY-NEPS engineered fusion
atggaagtaatgaaacacttcgttaccgttcacggtgtgggccacggggcctgggtatactataagttaaagcccaggatcgaggcagctggtcacaggtgtaccgcagtgaacctggctgcgtccggaatcaacgaaaaaaaactagaggaagtaaggtcaagtatagactatgcagccccactgcttgaggttttggactccgtgcccgaaaacgagaaagttatcctagtcggccattcaggcggaggaatgaccgcagcagtaggtatggagaagtttccgaacaagatcagtctggccgtatttctgaacgccataatgcctgacactgaaaaccgtcctagttacgttctggaagagtatacggccaaaacacctcccgaggcttggaaggactgccagttctcagcctacggggatccaccaatcacttctttggtatgtggtcctgagttcatttcttcaaccctataccatttgagccccattgaggatcacgcgctgggaaaaattctagttaggcccggttctctttttattgaggacctactgaaggctgaaaagttcacagaggagggtttcggtagtgtgcctcgtgtctatgtgatagcggctgaagacaagaccattcctccggaatttcaaaggtggatgattgaaaataatcctgttaaggaagtcaaagaaatcaaaggggcggaccacatgccgatgttctccaaacccgacgaactgagccaatgcttacttgacatagcaaagaaacacgcaggaggtggaggttccggtggaggtggaagtggcggtggagggtcaatgtcgctttcgtggtggagagccggagccgctaaaaagagaatggatgatgatgaatcccttttggttaaacaacagcagcagcaatgtgtggctctaattgttggcgtcaccgggttagtgggtaattcactagcagaaatgttaccactaccagatactccaggcgggccatggaaagtgtatggcgtagcaagacgggctcgtccttcatggaatgaagatcaaccaatgacatatatatcatgcgatgtcagtaacaccggcgaagtggaagccaaattatctcctttgtcagatgtaactcatattttttacgctacgtggacgtctagatccacagaggaggaaaattgtgaagcaaatggcaaaatgctcaaaaatgttctagatgcaatgataccgaattgccctaacttgaaacacatttgtctacaaaccggtagatttcattatgttgcttccgttgtagactggaagatcaatggatcacacgacaccccactaaccgaagacttgcccagattaaaaactaacaatttttattatacccaagaggacattcttttagaggaagttaagagaaaagaaggtcttacttggtcggttcatcgtccaggtacaatcttcggattctctccttattccatgatgaatctcgttggtacattatgcgtctatgctgccatatgtaaacaagaaggtgcagttttgcgatttcccggttgcaaaggtgcgtgggatggacattctgactgtgctgatgccgatttgatcgctgaacaacaaatatgggccgcattagacccgcatgctaagaaccaagctttcaatgtatcgaacggagatttattcaagtggaaacatttatggaaagttctcgccgaccaatttggtgtggagtgtggtgactatgaggaaggacaacagttgagattgcaagacgttatgaaagacaagggtcctgtttgggacaagatcgtggcagaaaacggactttctaacacaaagctcgaagacgtcggtaagtggtggttttccgacacaattttgtggaatgaatgtcgcttggattctatgaataaaagtaaagaacatgggttcttaggtttcagaaattcaaagaattgctttttgtactggatacataaagtcaaagcctacaatctcgtgccaagtacatatacg

SEQ ID NO: 1506 - DNA, 810 bp, Nepeta mussinii
atggctaataactcagtcatgatgaagaagaagttggaaggcaaggttgctatcgttaccggtggtgcttctgggattggtgaagcgacagcaaggttatttgtcaaatacggtgctagagcggttgtgattgcagatattcagtctgagttgggtcgttcggtcgctgaaagtataggtaaggaaaggtgcagttttgttcagtgcgacgttgccgacgaagaacaagtaaaatcaatgatagagtggacggccacgacttacggaggactcgatgttatgttttctaatgccggggtgttaaattccgctgctcaaacagttaaagatttagatttaccattattcgataaagttatgagggttaacactagaggggccgcagtctgtgtaaagcaagctgcacgtaaaatggttgaactcggtcgcggaggatctattatttgtaacgccggttcgtctgctgttcgtggagctcatggtgtgactgactacgttatgagcaagcatgctgttatcggtttagttagatcagccagtatgcagctgggggcgcattccattcgtgtcaattccgtcagtcccatggcggtcgctacaccattaacgcgtaatcaaggtatttcgacaccagacgatgtacagaaattcttgatgcctttcatttcattaaagggagtcccacctacagccgagcaggtcgctgaagccgctgcctttttaggttccgacgaagctgcttttgtcacaggtcatgaccttccagtggatggtggagtactatgtatgccattccttttaggttctgca

SEQ ID NO: 1507 - DNA, 810 bp, Nepeta mussinii
atggcaaacaactccgtaatgatgaagaaaaaattagaaggcaaggttgcaattgtaactggaggtgcgtccgggatcggtgaagccaccgcgcgtttattcgttaaatatggtgctcgagccgtcgtcatagctgatatacagtcagaattaggtaggagcgtagcagaaagcattggaaaagaaaggtgcagctttgttcaatgtgatgtagcagacgaagaacaggtcaaatcaatgattgaatggacggccactacatatggtggactagatgtaatgttttcaaacgccggtgttctcaacagtgccgcgcaaaccgtcaaggatttggaccttccgctttttgataaagttatgagggttaacacaaggggtgctgcagtctgtgtaaaacaagcagcacgtaagatggtcgaattaggtagaggggggagcattatatgtaatgctggttcaagcgcggtccgtggtgctcatggcgtgacagactacgtcatgtcaaagcatgctgttatcggtctggtcagatctgcctcgatgcaactaggtgcacactcaatccgtgtaaattcggtatctccaatggcagtcgcaaccccgctaaccagaaatcaaggtatctcaacccccgatgatgttcaaaagttcctcatgccgtttatatcgttaaagggtgttccaccaacggctgaacaggtcgctgaagctgctgcatttttgggttcggacgaagcggcctttgtaacgggtcacgacctacctgtcgacggtggtgtcttatgtatgccgttcttactgggatctgca

SEQ ID NO: 1508 - DNA, 774 bp, Catharanthus roseus
atggaggtcatgaaacatttcgttaccgtacatggagtcggccatggtgcctgggtctactataagcttaaaccgcgcatcgaagccgcaggccatagatgtacagcagttaatctggccgcatccggtattaacgaaaagaaactagaagaagttagaagttcgatcgattatgcagcccctttattagaggttctcgactccgtgccagagaacgagaaagttatattggtaggtcatagcggtggcggaatgactgccgctgtaggtatggagaaattcccaaacaaaattagcttggctgtatttctgaacgctatcatgcctgacacagaaaatcgcccatcttatgttttggaagaatatactgcaaagacgccccccgaagcttggaaagactgtcaattctccgcttacggtgacccacccataacatctttagtttgtggccccgagttcatctcatcaaccctataccacttaagtcctattgaggatcacgctctcggaaaaatcttggtaagacctggaagtttgtttattgaggatctgttgaaagctgagaaatttacagaagagggtttcggatcggtcccaagagtttatgtgatagcagccgaggacaaaaccataccacctgagtttcaaagatggatgatagaaaataatcctgttaaagaggtgaaggaaattaagggagctgaccatatgccaatgttttctaaaccggatgaattgagtcaatgtttgttggatatcgcaaagaagcacgca

SEQ ID NO: 1509 - DNA, 792 bp, Camptotheca acuminata
atggaagttttgtctaaaccgaaaaagcatttcgtgttgacacatggtgcatgtcacggggcatgggtttggtataaagttaaacccagaattgaggctgccggtcataggtttactgccgtaaatttggctgcttgcggcgtaaataaaaagcagttggacgaagtacgctcgttatacgactataccttaccactattagaggttttggctagtatcccagaaaacgaaaaggttatcttagttggtcatagcggcggtggtatgtctgcagctttgggtatggaaaaatatcctgaaaagattagcgttgcggttttcttgaatgctataatgcccgatactactcacggtccctcttatgttttagatcaatataccggaggaaccccaccagaggcatggaaggacacagaatttattacttttggtgatcctaaggaacccttatccggattggtcgtggggcctaaattcctaaagaccaccctctatcctttgtgtagcgacgaagactacacattgggtacattattggttcggccagggtcgttgttcatggaagatttacataaggcagacaagttcacagatgaaggattcggctcggtaaaacgtgtgtacgttgtctgtgatgaagataaaacaataccagctgagttccaaaggtggatgattgaaaataatccagtgaaagaagtaaaggaaataaagggtgctgatcatatgccgatgttcagtaaacaagatgaagtctgcaagtgcttattggaaattgcagaaaaatataat

SEQ ID NO: 1510 - DNA, 777 bp, Vinca minor
atggcagctctagcaaaacactttgtagcagtacatggggtcggtcatggttcatgggtatactacaaattaaaaccaagaatagaagcggcaggtcaccgcttcacagccgtaaacttagctgccgctggtataaatgagaaaaagttagaggaggtaagaagtagtgttgaatacgcagctccactactagaagtattgggttccgttcctgagaacgaaaaagtgattttaattgggcattctggagggggtatgacagccgcagttggtatggagaaatttgccaacaaaatctctttggcggtgtttcttaacgctatcatgcccgatactaaaaatcgtccaagttacgttttggaagaatatacggctaagacccctccagaagcttggaaagattgccaatttagcgcttatggtgagcctccaattacttccctggtttgtggtcctgagtttattgcttctacattataccacttgtctacagtagaggatcacgcacttggaagcttgttagtcagacccggatcactttttatggaggatttgttacaagctgaaaaatttaccgaggaaggtttcggttcagttccgcgtgtttacgtaattgccgctgaggataagactattccacctgaatttcaaagatggatgattgaaaataatcctgttaaggaagtgaaagaaataaaaggttcagatcatatgcccatgttctcaaaaccagacgatctctgcaaatgtctcttggagatagcaaagcaacatgct

SEQ ID NO: 1511 - DNA, 783 bp, Rauvolfia serpentina
atggaagttgcaaaactgcaaaaacactttgtagctgtccatggtgttggtcacggtgcctgggtttactataaattgaagccaaggattgaagcggtcggtcacaggtttacagctgtgcacctggctgccgctggtatcaatgagaagaagctacaagaagttagatctagcgttgaatatgctgcgccattgctcgaagtacttgcatcagtcccagaaaatgagaaggtaattctcattggtcattcagggggcgggatgacagctgctgtaggtatggaaaagttcccgaataaaatctctatggccgtatttttaaatgcaatcatgcctgacacgaagaacagaccaagttatgtgctggaggaatatactgcgaggactcccgttgaggcctggaaagattgtcaattctctgcttatggtgacccgcctatcacctcgttggtctgtggtcccgaatttatctcatccacgctgtaccacttgtctcctgtcgaagaccatgccctaggtaagctcttagtgcggccaggctcgttatttattgaagacttgttaaaagcggataaattcactgaaaagggtttcggttctgttccgcgtgtctacgtggtagcagctgaagataagacaattccacctgaatttcaaagatggatgatcgagaactctccagttaaagaagtcaaagagatcaagggagccgatcatatgccaatgttttccaagcctgatgagttgtgccaatgtcttctcgaaattgcaaagcaacacgcg

SEQ ID NO: 1512 - DNA, 774 bp, Catharanthus roseus
atggaagtaatgaaacacttcgttaccgttcacggtgtgggccacggggcctgggtatactataagttaaagcccaggatcgaggcagctggtcacaggtgtaccgcagtgaacctggctgcgtccggaatcaacgaaaaaaaactagaggaagtaaggtcaagtatagactatgcagccccactgcttgaggttttggactccgtgcccgaaaacgagaaagttatcctagtcggccattcaggcggaggaatgaccgcagcagtaggtatggagaagtttccgaacaagatcagtctggccgtatttctgaacgccataatgcctgacactgaaaaccgtcctagttacgttctggaagagtatacggccaaaacacctcccgaggcttggaaggactgccagttctcagcctacggggatccaccaatcacttctttggtatgtggtcctgagttcatttcttcaaccctataccatttgagccccattgaggatcacgcgctgggaaaaattctagttaggcccggttctctttttattgaggacctactgaaggctgaaaagttcacagaggagggtttcggtagtgtgcctcgtgtctatgtgatagcggctgaagacaagaccattcctccggaatttcaaaggtggatgattgaaaataatcctgttaaggaagtcaaagaaatcaaaggggcggaccacatgccgatgttctccaaacccgacgaactgagccaatgcttacttgacatagcaaagaaacacgca

SEQ ID NO: 1513 - DNA, 792 bp, Camptotheca acuminata
atggaggtactaagcaagcccaagaagcattttgttcttacacacggagcatgccacggtgcttgggtatggtataaagtgaagcctagaatagaggcagcaggccaccgtttcactgccgtcaatctagctgcctgtggggtgaacaagaaacaactggatgaagtgagatctctatacgactacactctaccgctgctggaagtgcttgcaagtatcccggagaatgagaaagtgatcttggttggtcactcaggtggcgggatgagtgccgcgttaggtatggagaaatacccagagaagataagcgttgctgtctttctgaacgcaattatgccagacacgacgcacggtcctagctatgttctagatcagtacacaggcggtactccgcccgaagcttggaaggatactgagttcataacctttggcgacccgaaggagcctctgagcgggcttgtcgtaggcccgaagtttctaaaaaccaccctatatcccctgtgttccgatgaggactacaccttaggcacgctgctagttcgtccgggatcattatttatggaggaccttcacaaggcggataagttcacggacgaagggtttggctctgttaaaagagtctatgttgtttgcgatgaagataagacaatacctgctgaattccaaaggtggatgattgagaataaccctgtaaaagaggtaaaagaaataaaaggggctgaccacatgcctatgttttccaagcaagatgaggtctgcaagtgtttgttagaaatagcagaaaagtataac

SEQ ID NO: 1514 - DNA, 777 bp, Vinca minor
atggctgccttagcgaagcatttcgttgcggtgcatggagtcggtcacgggagttgggtgtactacaagctaaaaccccgtattgaagcagcaggacaccgttttactgcggtcaatttggcagccgccggaatcaacgagaaaaagctagaggaggtcagatcatccgtcgaatatgctgcgccgttacttgaagtccttggctcagtgcccgaaaatgaaaaggttatcttaataggccactccggcgggggcatgactgccgcagtaggcatggaaaaatttgcaaataagatttccctggcagttttccttaatgccatcatgcctgacactaagaataggccttcatatgttctggaagagtataccgcaaaaactccacctgaagcctggaaagattgccaattttctgcttatggggaacctccaattacaagcctggtatgcggtccagagtttattgcgtctacactataccatctatccactgtagaggatcacgccttgggttctttgttggttagacccggttccctgtttatggaagacttgctacaagcggaaaagtttacggaggaaggctttggctctgtaccaagagtctatgtaatagctgcggaggataagacaatcccgcccgagtttcaacgttggatgatcgaaaataaccccgttaaggaggtcaaggaaataaagggatccgaccacatgccaatgttctcaaagccagatgacttgtgtaagtgtttactggaaatagcaaagcaacatgct

SEQ ID NO: 1515 - DNA, 783 bp, Rauvolfia serpentina
atggaggtggccaaactgcaaaagcatttcgttgcagtgcatggcgtaggacatggcgcttgggtctattacaagttaaaaccccgtatagaggctgtgggacatagattcaccgctgtccaccttgcggcggctggaatcaacgagaagaaactgcaagaggttaggagttcagtggagtacgccgcgccgcttctggaagtccttgcaagcgtgccagaaaatgaaaaagtaatactaataggacattctggtggtgggatgactgcggccgtcggcatggagaaattcccaaataaaatttcaatggcagtgttcctgaatgcaatcatgccagacacaaaaaataggccgagctacgtgttggaagagtacaccgctcgtacaccagtcgaagcatggaaagattgtcagttttccgcttacggtgatccacctataacaagcctagtatgtggtcccgaattcatttctagtacactatatcacttgagtcctgtagaagaccatgcgctgggcaagctattggtgagaccgggtagccttttcatcgaagatttactgaaggccgataaattcacggagaaaggtttcggaagtgtaccaagggtgtacgtggtagccgctgaagacaaaacaatacctcccgaattccagcgttggatgatagaaaattccccggtaaaggaagttaaagagattaaaggcgctgatcatatgcctatgttcagtaagccggatgaactatgtcagtgtttactggagatcgccaaacagcatgct

SEQ ID NO: 1516 - DNA, 804 bp, Nepeta mussinii
atggggaataagaaaacattggagggaaaggttgccattgttactggtggtgcaagcgggattggtgaaactgccgcaagggtgtttgcaaatttaggagccagagctgttgttattgctgatattcaatctgaactgggcagagaagtagccgagagcatcggtgctaaaaggtgtagttacgtccagtgtgatatcggcgatgaggaacaagtgaaatctatggtggagtggaccgccaccacttatggtgcacttgacgttatgttctgcaatgccggaatcatgtcaaaagcagaatcggctcaaactgttttggaattggatatgagtaaattcgatgaggttatgagagtcaatacccggggcacatctgcttgtgtaaaacaagctgctagaaaaatggtagagcttgggactaaaggaggcgctattgtttgtactagtagtccattagcttctcgtggtggctatatagataccgattatgtaatgagtaaacatgccgttatgggattagtgagatccgcttctatgcaactaggagctcacgggattcgcgtcaactctgtctctcctatggcagtcttgactccactgacccgcagaatggggttggcaactcccgctgatgttgaaaatgcttttgggcggtttacctccttaaaaggcgtagctttaactgccgagcatgtggctgaggccgctgcttttttggcctcagatgaggcagctttcataactggtcatgatttgatggttgatggtggtttattgtgcttaccattctttgcccctacttca

SEQ ID NO: 1517 - DNA, 804 bp, Nepeta mussinii
atgggtaataaaaaaaccttagaaggcaaggtggcgattgttactggaggtgcctctggtattggtgagacagctgctagggtcttcgctaaccttggtgctagagccgtcgtgatcgctgacatccaaagcgagttgggccgtgaggtggccgagtctattggcgctaaaagatgctcctacgtacaatgtgacataggcgatgaggaacaagtcaagtcaatggtcgagtggaccgcaacaacttacggagccttggatgtgatgttttgtaacgcaggtatcatgagcaaagcagagtcagctcaaactgtcttggaattggatatgtccaaatttgatgaagtcatgagagttaacaccagaggtaccagtgcgtgcgtaaaacaagccgcaagaaagatggttgaattaggaaccaaaggtggagctattgtgtgcacatcctctcccctagcatcacgcggtggctatattgacaccgactatgttatgtctaaacatgccgttatgggcttagtaaggtccgcatcaatgcaacttggcgcacatggtattagagtaaatagtgtctcgccaatggcagtgttaactcctttgacccgacgtatgggtttagcaacaccagctgacgttgaaaacgccttcggacgttttacaagtctaaaaggtgtggctttaacggccgaacatgtggcagaagccgcagcatttttggcttccgatgaagcggcattcatcaccggacacgatcttatggtggatggcggtttactttgcttgcctttctttgcacctacatcc

SEQ ID NO: 1518 - DNA, 774 bp, Catharanthus roseus
atggaggtgatgaaacactttgttacggtgcatggcgtggggcatggagcgtgggtgtactataaactgaaaccccggatcgaggcggcgggtcaccgctgcaccgcggtaaacttagcagcaagtggaattaacgagaaaaaactggaggaagttcgtagctccattgactacgccgcaccgttgctcgaagtgctggattcggtaccagaaaacgagaaggtcattctggtaggccattcggggggcggcatgacagcggcagtagggatggaaaaatttccaaacaaaatttcgctggcggtattcctgaacgccattatgccggacacggaaaaccgcccgagttatgtattggaagaatatacagcaaagactccgcccgaagcgtggaaagattgccagttttccgcatatggggatccacccattacgtctctggtgtgcggtccggagtttatttcgtcaaccctgtatcatctgagtccgattgaagaccatgcgcttggtaagatcctcgttcgtccaggttcccttttcattgaggatctgttaaaggccgaaaagttcaccgaggaaggttttgggagcgtgccgcgtgtgtatgttattgcagccgaagataaaacgattccgccggaattccagcgctggatgattgaaaacaatccggtgaaagaggtgaaagaaattaagggtgccgatcacatgccgatgtttagtaaacctgatgagctgtctcagtgcctcctggatattgcgaaaaaacatgcc

SEQ ID NO: 1519 - DNA, 792 bp, Camptotheca acuminata
atggaagtcttaagcaaaccgaaaaaacacttcgtcctgacgcatggcgcttgccatggcgcctgggtgtggtacaaggtgaagccgcgtattgaagcggcgggccaccgctttaccgccgttaatctggcggcctgcggcgttaacaaaaagcagttagatgaggtgcgcagtctgtatgactataccctgcctttactggaggtcttagcctcgattccggaaaatgagaaggtgatcctggtcggtcacagcggtgggggtatgagcgccgcattaggaatggaaaagtaccctgaaaagattagtgtcgccgtgttcttaaacgccatcatgccggacaccacccatggtccgagttatgttttagatcagtataccggcggtaccccgcccgaggcatggaaagataccgaatttattacgttcggtgaccctaaggagcccctatcgggcctagtagtaggcccgaagtttttaaaaacgaccctttacccgctttgtagcgatgaagattatacgctgggtacgctgctggttcgtccaggcagtctgtttatggaggacctgcacaaagcggataagtttacggatgaaggattcggctcagtgaaacgtgtgtatgtggtgtgtgacgaagacaaaaccatccctgctgagtttcagcgttggatgattgaaaacaatccggtgaaggaagtgaaagaaataaaaggagcagatcatatgccgatgttttctaaacaggatgaagtgtgcaaatgcctgctcgagatcgcggagaaatataat

SEQ ID NO: 1520 - DNA, 777 bp, Vinca minor
atggcggcactggccaaacatttcgtggcggtccatggtgtggggcatggctcgtgggtatattataaactgaaaccgcggattgaagccgcaggacaccgttttaccgcagtaaacctcgcagccgcgggaataaacgagaaaaaattggaggaagtacgtagctctgtggagtatgccgctccgctgctggaggtcttgggcagcgttccggaaaatgaaaaagtcattttgatcggccattcgggtggaggcatgacggccgcggttggcatggagaaattcgcgaacaaaattagtcttgctgttttcctgaatgccattatgccggacacgaaaaaccgaccgagttacgttctcgaggaatataccgcaaaaacccctccagaagcgtggaaagactgtcagttttcggcctacggtgaaccgccgatcacctcgctagtttgcgggccggagtttatcgcctcgacgctttaccatttatcaactgtggaagatcacgccctgggctcgctgttggttcgcccgggctcactgttcatggaggatctactacaggcggaaaaattcactgaagaaggttttggctcggttccgcgtgtatatgttatcgccgctgaagacaaaaccattccgcccgaatttcagcgttggatgattgagaataacccggtcaaggaagtgaaggaaattaaaggctcggatcacatgccgatgttctctaaaccagatgatctctgtaaatgtcttctggaaatcgcaaagcagcatgcc

SEQ ID NO: 1521 - DNA, 783 bp, Rauvolfia serpentina
atggaagttgccaaattgcagaagcatttcgtagcggtgcacggcgtgggccacggcgcttgggtgtactacaagctgaaaccgcgcatcgaagccgtgggccaccggttcacggcggttcaccttgcggccgccggcattaacgaaaagaaacttcaggaagttcgctcttcggtagagtatgcggcgcctcttctagaggttctcgcgtctgttcctgagaatgaaaaagtaatactgattggccactccgggggtggaatgaccgcagcggtaggcatggaaaaatttccgaacaaaattagcatggccgtgttcctgaatgcaattatgccggatacaaagaatcgcccgtcttatgttctggaagaatataccgcccgcacacctgtcgaggcgtggaaagattgccagttctcagcctatggtgatccgcctattacaagcctagtgtgtggccccgagttcatttcttcgactttataccatctgagtcctgtcgaagaccatgcgctgggcaagcttcttgtgcgccctggctcactgttcatcgaggatctccttaaagcggataaattcaccgaaaaaggcttcggatcggtgccgcgcgtctatgtggtggccgcagaggataaaaccatacccccagaattccagcgttggatgatcgaaaactcaccggtcaaagaagtgaaagaaattaaaggcgcggatcacatgcctatgttttcgaagccagacgaattatgccagtgcctgttggagattgcaaaacagcacgcg

SEQ ID NO: 1522 - DNA, 783 bp, Andrographis paniculata
atggtcggtactgcagcacaacattttgtcgcagtacatggtgtagggcatggtgcttgggtttactataaagtcaagcctagaatggaagcagctggagtgcggtttacaccagtctctctggctgcagctggtaataatggaaagaaattggaggaagtacgcagtttgcatgattacacaactccattgttagaagtacttgccgctgtaccagccggcgaaaaggttgtattggtaggtcattcaggtggaggatatcctgctgcttacgcaatggaaaaatttccagagaaaatttctgtggcagtctttgtcaatgcattaatgcccgatacaaagaacagaccaagttacgtgattgatgagtatttggcaaggactccacctgaagcatggatggatacccaattccctacatatggtgatcctcccataacagctttggttgttggcccgaagtttatttcggattccttgtataacttaagcccagtcgaagatcaagccttaggtcacttatcagttaggcctggttcactctttatggaagatttagcgactatggataaatttagtgatgataaatttggtagtgttaggagggcctacattgttgcggctgatgataagactataccagcagaattccagcgctggctgatcgaaaacaatcctgttgctgaggttaaagaaattaagggtgccgaccatatgcctatgtttactcaaccggatgccctatgcaagtgcctattagagatcgctcaaaagcatgcagct

SEQ ID NO: 1523 - DNA, 777 bp, Gentiana triflora
atgtctccaacgaaacattttgttgcggttcacggtgtcggtcacggcgcatgggtttactataagcttaagccacgaattgaggcagctggttttaaattcaccgccatagacctagcagctgccggtgtaaacccaaaaaaattagaagaagtcaacagcttggaagaatactgtggaccactttttgatgttctcgccgctgtacctgagggagagaaggtcatcctcgtaggtcactctggtggtgggttatcggccgctgttgggatggaaaaatttcctaagaaaataagtgtggctgtattcttaaacgctatcatgccggatactaagaacagaccatcttatgttatggaagaatacacagcaagaactcccatcgaggcttggaaagacactcaattctccgcatacggtgaacctcctattacggcgttgttgtgtggtccggaattcataagcactagcttgtaccacctttctcctgtagaagatcatacactgggtaagttgttggttagacctggtgctctttttgttgaagatttattgaagggtgctgtgaaatttacagatgaaggtttcggctccgtcccaagagtctacgtggtcgccactgaagacaagacgattcctccagaattccaaagatggatgatagaaaacaatccagtggctgaagttaaagagatacagggcgcagatcatctgcctcaattctctaaacctgatgaacttacacaagtactagttgacatcgctaaaaatcatggc

SEQ ID NO: 1524 - DNA, 792 bp, Coffea canephora
atggaagccataaaggaacaacccaaacactttgttgcagtacacggggttggtcatggtgcatgggtttactacaaattgaaaccccgcattgaagcagccggtcatagatttacgcctgttgatttagctggggcggggaggaatgaaaaaaagttagaagagattagaactatggttgattacacccgtcctcttttggaggttttggcgtccatccctgaaaatgaaaaagtcattttgatcgggcacagtggaggaggcatggctgccgcggtgggtctggaaaagtatcctaacaaggtgtctgttggtgtcttcttgaacgctatcatgccagatgcgaagaatagacctagttacgtattcgaggagtacacggcacgcacgccaatagagaagtggttagatactaaattctttccgtatggtgatcctcctatcatggctttgctctgcggtccagagttcatttccaattccctatataatagatcccccaaggaagaccaggctctcgggaaattattagtaagaccgggatctcttttcatggaagatttattgcagactgagaagttatttaccgaagaacgttttggtagtgtccctcaggcgtatgtgatcgcatcggatgacaaaactataaccgcagatttccaacgctggatgattcagaacaacccttgcgttaaggaagtaaaggaaatcaagggtgctgatcacatgcccatgttcaccaagcccgatgaactgtgtcaatgtctgttagagatagccaagacttatgcc

SEQ ID NO: 1525 - DNA, 786 bp, Ophiorrhiza pumila
atggaggctactaagcaacaacaaaaacactttgttgcggttcacggcgttggccatggagcctgggtgtattacaagttaaagcctcgtattgaagcggctggacacctatttcgggcgattgatttaagcgcatctggcgcaaatgatacaaagcttgaagaaatccattcattacatgaatatacgaagccacttttggatgtactagctagtgttccagagaatgagaaagtgattttgatcggtcacagcggcggcggtatgggagcagcagttggaatggagaaataccctgataagatctctctggctatatttctgaatgctattatgccagattccaaaaatccaccgtcttacgtactggaacaatataccgcgcggacacctctggatgcttggaaagacacgaaattttctgcctatggcgacccacctataacatctttattggtgggtcctgaatttatttcctcgactctttaccatctatcaccaaaggaagaccaggccttgggtaaattattagttcgtccgggttctttgtttattgaagaccttctaaaagctgacaagttctctgatgaaggatttggtagtgttccacgtgcctacgttatcgctggtgatgataaaacaataccagctgattttcagagatggatgattgaaaataaccctgtgaaggaagtcaaggtaatcaatggtgcggaccatatgcccatgttctccaaaccagatgaattatgtcaaaacttgttggaattggctaaaaaacacgcc

SEQ ID NO: 1526 - DNA, 762 bp, Phelline lucida
atggtacacttcgttgcagtccacggcgtttgccatggagcctgggtgtattataagctaaaaccccgggttgaagctgctggtcaccaattcacttcggtgaatctagccgccagtggggtcaacgaaaaaaaattggaagagttgcattcactccatgactacgcgttacctttactggaagtgttagcaagtgttccagaaaatgaaaaagttattctaattggtcatagtggtggaggaatgtcagctgctgtcggtatggaaaattatccagataaaattttagccgcagtcttcttaaacgcgattatgcccgatagtactaatagaccttcttttgtcttggaaaagtacacggctgaaacccccttggaagcctggaaagactcgcaatttggagcctttggtgatccacccatcacctcagtcattgcggggccggaattcctatcggtattatatcatctctcaccagttgaagatttgactttaggtcgtttgttagtgagaccaggttctttattcattgaagaactacttaaatcagataaattctccgaagaaaaatttggaagtgtgaagcgtgtgtacgtcgtttgcactgaagacaaatgcatcccagaggaatttcaaagatggatgattgaaaataatccggtcacagaggttaaggtcattgaaggtagtgaccacatgcccatgttttccaaacctgatgaattgtgccaatcactagttgaaattgcagatacatatgca

SEQ ID NO: 1527 - DNA, 783 bp, Vitex agnus castus
atggctgggacggagcaaaaaaaacattttgttgccgtccatggtgtcggtcatggcgcctgggtgtattataagcttaaaccacgcatggaagctgcgggttatagattctcgcctataagcttggccgccgccgggaataacggtaagaaattagaagaggtaagatccctgcatgattacaccacgccacttttagaagtcctagcatccgtgcctgacggtgaaaaggtcattctaattggccacagtggtggcggttacgccgccgcttatgctatggaaaagtatccagaaaaaattgccgttgccgtctttttaaatgcgttgatgcctgattctaagaatagaccttcttatgtgattgatgagtatcttaagagaaccccaccagaggcctggatggacactcaatttcctacatatggtgaccctcctattacagccttagtggttggtcccaaattcattagtgaatcactctataatttaagtcccatagaagatcaggctttaggtcatctgtctgtacgtccgggttctctatttatggaagatttagctaccatggacaaattttctgatgataaatttggtagcgttccacgtgtttatgttattgcagctgaagataaaactattccacccgaattccagagatggcaaatcgaaaataacccagtggaagaggtaaaagaaataaaaggtgcggaccatatgccgatgtttactcagcctgatgcactagctaaatgccttggtgaaattgcggaaaaatacgcc

SEQ ID NO: 1528 - DNA, 780 bp, Valeriana officianalis
atgacgaaagatcaaaaacatttcgttgctgtacatggagtctgtcatggggcctgggtttactacaaagtaaagcctagagtagaagccgcaggtcataagttcactgcagtggacttagcggcctccggagctaacgagaaaaatttaaatgatgttacaagtatgctagaatacactaagccccttttggatgtcttggcagctattccggatggggaaaaagttattttagttggccattccggcggtgggatggctgcagcactaggtatggaaaagtttcctgaaaagatttccgtggctgtattcgtttgcgcgatcatgcctgatactactaacacccctagcttcgtgcttgaaaagtattcggcaggtacgccacctgacgcttggaaggactgccaattctcggcaatctcggacccacctatcacgtgtttgtcagttggtcctgaatttctcaaggcgttcctctataccaagtgcccagtagaggactatacccttgctactcttcttgctaaaagaccaggctctctctacattgaggatctaatgaaagccgataaatttaccgaaaagggttttggtagtgtccctagggtatacgtcgtgtgccctgaagatgattgtattcccgctgtctttcaaaagttcatgattgagaataaccccgtcgtagaggttaaagagattccgggcgccgaccatatgcctatgctctccaagcctgatgaattggccaaatgttttgtagagattgctgaaacatacgcg

SEQ ID NO: 1529 - DNA, 765 bp, Stylidium adnatum
atggtacacttcgcagccgttcacggagtgtgccatggttcttgggtttattataaagtgaagccgctagtagaggcagcgggccataaatttactgctatagacctagccgctagtggtgtgaacgaaaaaaagttggaagacctacacagtcttcaggattatacatctcctttattagactttttagcatctttaccaaagaatgaaaaggttgctttgattgggcacagtggaggcggcatgtctgccgctgtcgggatggagaaatatccagataagattttggtggctatttttcttaacgccatcatgccagatacgaaaaatcaacctagctttgtcttagaacaatatagtgcaggaaccccgttggacgcctggaaggatacaaaatttggtgcttatggggacccccccattacatcattatccgttggtcccgaatttatttcttctacattatactcactttctcccaaagaggactttactctgggtacgctcttggttaggcctgggagtttgttcatagaggatttgatgaaggccgagaagtttaccgatgaaggattcggttcagttaaaagagtttatattgtatgtactaaggataaaaccatcccggaagaatttcagagatggatgatcaagaataatcctgtggaggaagtcaaaatcattgaaggagccgatcatatgcctatgttctcgaaaccagctgaactatgccaatgtttggtagaaatcgcgaaaaagtacgcc

SEQ ID NO: 1530 - DNA, 780 bp, Verbena hastata
atggccgcggcgcaacctaagcattttgtcgctgttcatggagtaggtcacggtgcttgggtttactataagttgaaacctagagttgaggcagcaggttacaagtttactccaatttctttagctgctgctggtaataatggtaaaaagattgaagaagtacgtactctaggtgactacactgaaccattgttggaagcattggcagcggtcccagaaggggaaaaagtgattttgattgggcactcaggtggtggctgtgctgcagcttatgcgatggaaaaatatccggaaaagatatctgttgcagtctttcttaacgctattatgcctgacagcaagaataaacctagttatgtgattgatgagtacttagctcgtactcctatggaggcctggatggacacgcaattcgtgcctttaggtgatcctccaatcaccgggttgctatgcggccccaagtttatcagtgaaagtttatataacttgagccctttggaggatcatgcactcggtaacctgtctgtaagaccaggctctttgtttatggaggatgtggccacaatggaaaagttttctgatgaaaaattcggtagtgtacctagagtgtacgtcattgcagcggaggataaaactataaagcccgagtttcagagatggatgatcgaaaataacccagtaaaagaggtcaaagttatagaaggtgccgatcacatgccgatgttttccaagcctgatgagctttgtaaatgtctagttgagattgctgaaaagcatgcc

SEQ ID NO: 1531 - DNA, 786 bp, Byblis gigantea
atggttggtcccacagaaaaacagaaacattttgtcgccgtacatggcgttggtcatggagcgtgggtgtactacaaactgaaaccaagaatcgaagctgcaggatacagattcacaccagtttctttggcagcggcaggtaataatggaaagaaactggaggaggtccgcagtttacacgattacactatgccactattggaagtattagcggcagttcctgaaggtgaaaaggttattttgattggtcattctggtgggggttatgctgctgcatacggtatggaaaaatacccagagaagatctcagtggcagtttttctgaacgctttaatgcccgattcgaaaaacagaccatcttacgtaatagacgagtatttaaagaggacgccaccagaagcttggttagatacccaatttccaacctatggtgaccctccaataacgggtctggtagtaggaccaagatttatatcagagtcgttgtataatctttctcccgttgaagatcaagccctgggccatctaagtgttagaccaggtagtttgttcatggaggatcttgcaactttggataaattttccgatgaaaagtttggatccgtccctcgcgtttacgttatagcagcagatgacatcacgatacctgcagatttccaaagatggctaatagaaaataatccagtgaaagaagttaaggaaattaagggtgccgaccacatgcctatgttcactcaacctgacgcactatgtaaatgtttggttgaaatcgccgagaaatacgct

SEQ ID NO: 1532 - DNA, 783 bp, Unknown
  Pogostemon sp.
atggtgggtgcagcacagccaaaacattttgtcgctgttcatggtgttggtcacggaagttgggtctactacaaattaaaaccaagagtagaagcagcaggatatagattcagtccggtatccttggcggccgcaggtaacaacgggaaaaagctagaagaagtaagatcattacatgattacaccgagccattattggaagtattagcggccgtccccgatggggaaaaagtcattttgattggacattctggtgggggctaccctgccgcttacgcgatggaaaaatatcccgacaaaattgctgtggcagtattcctgaatgctttaatgcccgacagcaagaacaagccttcgtacgtaatagacgaatacttagcacgtacaccaccagagaactggatggatactcaattcgtcccattcggagatccaccaattgtcggcctgttgtgtggacccaactttatcagtcaatctttgtataatttatcaccaatagaggatcaagctctaggtcaattaagtatcagacccggttcactatttatggaagatctcgcaactatggagaagtttagcgacgaaaagttcgggagcgttcctagagtatatgtgattgcaaatgaggacaagacaattcctccggagttccaacgctggcaaatagagaataaccctgttgctgaagttaaggaaataaaaggtagcgaccatatgcccatgtttactcaaccagatgctttggcaaaatgcttggctgaaatagcggacaaatatgca

SEQ ID NO: 1533 - DNA, 783 bp, Strychnos spinosa
atggaaagtgccaaacaaccaaaacattttgtcgctgttcacggggtcggtcatggcgcatgggtgtactataagcttaagccaaggatcgaagcagccggacataggttcacaccggtgaatttggctgcttctggtataaatgagcaaaaacttgaagagatacactccttgcatgaatataccaagccattgttagatgttctagcttctattccagaaaatgagaaggttattttgatcggtcattcggggggaggcatgtccgctgccgtcggaatggagaaatatccccataaaatctcggttgctgtttttttaaacgcaattatgcctgattctaagaatggggcctcatatgtactggaacaatattcagccaggacacctttagatacatggaaggacacgcagttctcgcaatacggagatccaccaattacagctctagtgtgcggaccagaatttattagcactacgctgtatcatctttcacctgtcgaagatcatgctttagggacgttgctagcaagaagagggtcgttgttcatcgaggatctaatgaaagcagagaaatttactgacaaaggttttgggtcagtccctagagtttacgtggttgccgcagaagatcggacgattccaccagaatttcagagatggatgatagaaaacaatcctgtgaaggaggtcaaagagataaaaggagcagatcatatgcctatgttctctaaaccagatgagttatgcaagtgcttggtcgaaatagcaaaaaagcatgct

SEQ ID NO: 1534 - DNA, 768 bp, Corokia cotoneaster
atggtccaattcgtggcggtccacggggcatgtcatggtgcctgggtttactataaacttaaacctcgggttgaagctgcaggtcacaaatttacagctgtgaacttaggagctagcggaataaacgaaaaaaaattagaagaattacactctttatacgattatactttgccgttattagaagtactgggctcaatcccagatggtgaaaaagttgtattgattggtcattccggcggcggtatgagtgctgcgttaggtatggaaaaatatccagataaaatttcggtggcagtttttttgaatgctattatgcctgattctaccaacagaccatcatttgtattggaaaagtacagtgctgagacccctattgaagcatggaaagactctaagtttgctgcttacggtactgatccgcaaataacatcagtcactgtgggtccggaattcatttcatccactttgtaccacctttccccagtagaagactacactctgggtaccttattagtacgtccaggttcgctgtttatagaggacctactgaaagctgataagtttacggatggtggctttggctcagtgaagagagtttatgtagtttgtacagaagatagaactatccctgaggaatttcagagatggatgatcaaaaacaacccagtcacggaagttaaggaacttaagggtgctgatcatatgcctatgttttctaaaccagatgcgcttagccaatgcctaaatgaaatcgcggagacttacgcg

SEQ ID NO: 1535 - DNA, 774 bp, Oxera neriifolia
atggcacaacccaaacaatttgtggctgtacatggtgtaggccatggtgcttgggtctactataaactgaaaccacgaatggaggctgccggttatagattctcccccatttcgttggccgccgcagggaattccggtaagaaattagaagaagttagaactctacaggattatacaacacctttgcttgaagcgttagcagctgtacctgaggatgagaaggttgttttaataggacatagcgggggcggttacgccgctgcttgcgctatggagaaatgtcccgaaaaaattgccgttgctgtttttttaaacgcattgatgccagattctaaaaataggccatcttatgttattgatgaatatttggccagaacaccacctgagaattggatggatacacaattttccacctccggagacccacccataggtgctctactatgtgggcctaaatttatctcggaatctttgtacaacttgtctccgatagaggatcaagctcttggccatttgtctgtccgtccaggcagtttgttcatggaagacctagctaccatggataagttttccgatgaaaaatttggttccgtcccccgtgtttatgttattgcagccgaggataaaactattcctccggatttccaaagatggcaaattgagaacaaccctgtggcggaagttaaagagattaaaggtgcagatcatatgcccatgtttacacagcccgatgcattggcaaaatgcctggcagaaatcgccgagaaatatgct

SEQ ID NO: 1536 - DNA, 786 bp, Unknown
  Buddleja sp.
atggctgctgccgcggtacccccacaacattttgtcgcagtccacggggtaggacatggagcgtgggtctattataagttaaaacccagaattgaagcggccgggcaccgatttaccccaatctcgttggccgctgctggcaactctccgaagaagctagaagaagttaggtccttgcatgattacacagtgcctctactagaagttttggctgaggtgccagaagatgaaaaggttattctaatcggtcacagtggtggaggatacgctgctgcgttcggtatggaaaagtacccagagaaaataaaggttgcagtttttctcaacgctctaatgccagactccaagaataaaccctcctatgtcattgacgaatatctggctaggacccctcctgaagcgtggatggatactcaattcccctcatacggtgaaccgccaataactgctttagttgtaggtcctaaatttatttcggaatcactgtataacctatcaccaatagaggatatagctctgggccatttgtcagttcggccaggttcactttttatggaggatttggcaactatggataaattttctgacgataagttcggatctgtaccgcgcgtttatgtcatcgccgcagaagacaaaacaattcctccagactaccaaaggtggatgatagagaataacccggttgaagaggtcaaagagataaaaggtgctgatcatatgcctatgtttactcagccagacgccttgtgtaaatgctttgttgagattgcggagaaatatgcc

SEQ ID NO: 1537 - DNA, 774 bp, Gelsemium sempervirens
atgcaacaaaagcattttgtcgctgtccacggtgcatgtcatggcgcttgggtctactacaagctcaagccaaggatagaggccgcaggacacagactaacacctgttaacctaggtgcttcaggcataaatgagaaaaagcttgaggaaatccactccttagatgaatacactgcaccactacttgaagtattagccagcatacccgaaaacgagaaggtgattctcattggtcattctggaggaggaatgagcgctgctgtgggtatggaaaaatatccggagaagatcagtgtcgcaatttttctaaatgctattatgccagattctaagaataggccatcttacgtgttggaacaatatactgcaaggactccacttgatgcctggaaagattcacaattcagcgcctatggcgacccacccataacctctctagtttgtggtccagaatttatatcttccacgctctaccatttatctcctgtagaagatcatgcactcggacgcttgttggtacggccaggatctctattcattgaagatctgttgaaagctgataagtatttcactgatgaaggatttggttctgtacctcgtgtgtatgttgtcgcaactgaagacaggacgattccccctgaattccaaagatggatgattgaaaataatcctgtcaaagaagtaaaagaaataaaaggtgctgaccacatgccgatgtttagcaaaccagatgaattgtgtcaatgcctggttgaaatcgcaaaaaagtatgca

SEQ ID NO: 1538 - DNA, 777 bp, Unknown
  Utricularia sp.
atggctgcagtacagaaacatttcctcgcagtgcatggcgttggtcatggagcatgggtttattacaaactaaagccaaggatggaagcggcagggtacagattcagccctatatcgctagcagcagctggtaactcagtaaagaaactcgaggaagtacgttctttgcatgattatacaactcctttgttagaggaattagcggctgtaccagacggtgagaaagttgtcctgataggacatagtggtggtggaattgcagctgcatatgcggcagaacaataccctcagaagattgcggtcgcagtgttcctcaacgctttaatgcctgataccaagaatagaccatcgtttgttattgaagaatatatgaagaggacacccatcgaggcttggttggatactcaatttcccacctacggagatcccccaataactgctttggtagtcggacctaaattcatatctgagtcattgtataatctatcgccgatagaggatcaggctcttgggcacttatccgtccgtccagggtcattgtttttggaagacatggctacgttaccaaatttttctgatgataaatatggttccgttcccagggtttatgttatcgcagctgatgacaagaccattcctgcagactttcaaaggtggcagattgaaaattaccccgttgcagaagtcaaggagatcaaaggtgcagatcacatgccaatgtttacgcagccagacgcattagcgaaggcactgtctgaaattgcagataaatttgca

SEQ ID NO: 1539 - DNA, 768 bp, Unknown
  Scaevola sp.
atggttcaatttgtagcagtacatggtgcttgtcacggagcttgggtctattacaaaattaagccaatggtcgaggctgccggtcacaaacttactgccgtaaatttagccgcttgtggaaattcagacaaaaagctgtcagagttgaacagtttacatgattacactctacctttgctagaagttctagaggcggttcctgccggtgaaaaagtcgtgctaatcggtcactctggtggtggaatgtcagctgcattaggcatggaaaaatatccagaaaaaatcgctgctggcgtctttatatgcgcgatcatgccagattctatcaatagaccctcctttgtactggaaaaatataccgctggaactcccccagaagcctggaaagattcaactttcggtgcatttgggtcggaagtccaaataacatccgtgaccgttggtccagagttcctgaaaacgaatttatatcagttgtgcccggtggaggattttaccctagctactttatcagttcgtcccggcagcatattcattgaagatctattgcgtgcagagaaatttacagacaagggcttgggctctgtgaaaagggtgtatgttgtatgtcctgaagacaaatgtatccctgccgaattccaaaaatggatgatcgaaaataatccagttacggaagttaaggaaattaagggtgccgatcacatgcccatgttctcaaaaccagctgaacttactaagtgtttaattgagatcgcagaaacatacgcc

SEQ ID NO: 1540 - DNA, 768 bp, Menyanthes trifoliata
atggtgcaatttgtggcatgtcatggtgcatgtcatggtgcctgggtttattataagcttaaacctttggtagaagccgcaggacataaatttactgctgtgaatctggccgcatctggggtcaatgaaaagaaactcgaggaagtacactctttacacgattacactttaccactattagaggttttggcagatgtaccagaaggtgagaaggtgatattaatcggccactcaggtggtggtatgtcggctgcggtcgctatggaaaaatatccagaaaaaatctcagttgctgttttcttaaacgcaattatgcctgattcaaagaaccgtccgtctttcgttttagaaaaatacggttcaggtactccgctcgaggcctggaaagattcgaaatttggtgcttatggcacggaccctcagataactacagtcttggtgggaccagagtttatcaagtctaccctttacacgctttgctccgatgaagacatcaccctggggaatcttttagttagaccaggtagtctattcatcgagccacttttaacagcagagaaattcacagacgaaggttttggaagtgtaaaaagagtatacattgtggctacagaagataaaactatacctgaggaattccaacgctggatgattgaaaataatccggtcaccgaggttaaagaaataaagggtgctgatcatatgccgatgttttctaaaccagctgagttgtttaaaagcttagtcgaaatcgcagaaacttatgct

SEQ ID NO: 1541 - DNA, 780 bp, Pinguicula caudata
atggcagcagctcaacctaaacagtttgtagctgttcatggtgtaggacatggtgcttgggtctactataagcttaaaccaagagttgaggctgcaggatacaggttcactcctatttcactagcagcagcagggaataatggtaaaaagttagaagaggtaaggtccctacatgactataccgagccattactagaggcactggcagctgtcccagagtctgaaaaggtaatattaattggacattccggtgggggttacgcagcagcctacggtatggagaaatatcccgagaaaatttctgtcgcagtgttcttgaacgccttaatgccagacagcaagaataggccttcttacgtaatcgatgagtacttaaagaggacaccagcagaggcatggctagatacgcaatttttgccctacggtgatccgcctatcatctctcttatttgcggtccaaagttcatttcagaatcgttatataacctgagtccacttgaggatcacgctctgggacatttatcggtcagacccggctccctcttcatggaagatttggccacgttacctaattttagcgatgaaaaattcggtagcatacccagggtctacgttattgctagcgacgacaaaaccattccacctgactttcaaagatggcagattgaaaacaatccggttgctgaagttaaggaaataaaaggtgctgaccatatgccaatgtttactcaacctgatgcgttaacaaagactttggtagagattgcggagaaatttgct

SEQ ID NO: 1542 - DNA, 780 bp, Psychotria ipecacuanha
atggcagctacccaacagaaacactttgtagctgttcatggtgtaggtcatggcgcttgggtttactataagttaaaaccacgaattgaagctgcaggacatcgcttcactcccgtagatttagcagcggcaggtgtaaacgatactaaacttgaagagttacattctctctgcgattatacgaagcctcttctggatgtattagccgccgtgccagaaaacgaaaaagtcattctaataggtcattccggtggaggcatgtcagctgccgtaggtatggaaaagtacccaaataaaatttctttagctattttcttgaacgccattatgcctgatgctaagaatccaccttcgcatgccttagagcagtattcagcacgtactcccttagacgcttggaaggatactaaattttcggcatacggggatccaccaataacaacattgctagtcggcccagaatttatttctaccacattgtaccatctatctcctaaagaagatcaagctttgggtaatcttttagcaagaccaggcagtctcttcattgaagatctgctaaaagccgataagtttacagaaaaagggttcggctcagtcccaaggacatacgtcattgctgcagacgacaagacaatccctgctgacttccagcgttggatgatcgaaaacaatccagtgaaggaagtcaaagaaattaaaggcgcagatcacatgcctatgtttagtaaacctgacgaattatgcttaacattaatggaattagcaaaaaaatacgcc

SEQ ID NO: 1543 - DNA, 777 bp, Dipsacus sativum
atgccaactcagcaaaaacattttgtggctgtccacggtgtatgtcacggatcttgggtctactataaactaaagcctagggttgaagcagctggacatcaattcacagcagtaaatctcgcagcatcaggtgttaacgaaaaaaagctagaagaagttacttccctggatgaatataccaagccattatatgaggtgcttgcagcagtgcccgaaaatgagaaggtgatcctggtgggtcactcaggaggtggcatggcggcagctttaggtatggagaaatacccagaaaaaattagcgttgcagtcttcgtatgtgcaattatgccagatagtactaatagtccatctttcgttttagagaagtattcaggtgggactccaattgatgcctggaaagactcacagtttggtgtgtttggggatccaccgatcacatcaataactgtgggtcctaattttctcaagagcacgttatataccctttgtccagtcgaggatttcactcttgcaactctgatggtgagacctggctccttgtatattgaagacttgatgaaagccgataagttcacagataaaggtttcggaagcgtcccgagagtttacgtcgtatgccctgaagataaaactataccagtcgagtttcaaaaatggatgattgaaaataatcccgtaactgaagtaaaggaaattgtaggtgccgatcatatgcctatgatgtctaaaccagatgaactgtgtaagtgtttaggagagatcgctgataaatatgct

SEQ ID NO: 1544 - DNA, 774 bp, Exacum affine
atggcacctaagcattttgttgccgtgcatggcgtcgggcacggtgcatgggtatactataagctaaagcctagaattgaggccgccggccaccaatttactgccatcgaccttgcggcagcgggcgttagtgaaaaaaaactagaagaagttcattctttgaatgactatgttgctccgcttttggatgcgcttgcgtcagttccagaaggggaaaaagttattttggtcggacatagtggtggaggattgagcgctgccgttggtatggaaaagtatccagaaaagatatctgtggctgtattcctaaacgcaattatgcccgacacaaaaaatagacctagttatgttatggaagaatacaacgcgcgtacgccacttgacgcatggaaagatactaagtttttaagctatggcgaccctccattaaccgcactgctttgcggtcctgaatttattagctcttctttgtaccacttatccccggtcgaagaccatgccctcggtaaacttttagtgaggcccggcgcattatttgttgaagatttggtaagaggcgacgtgactttcacggaagaaaaatttggttctgtacctcgtgtgtacattgtagcaaaagaagatagaacaatcccggctgactttcaaagatggatgatagagaataatccagtgaaagaggttaaagagattgaaggatccgaccatctgcctcagtttacgaaacccgatgaactgtgccagtatttggtcgatatagcgaacaagtatggc

SEQ ID NO: 1545 - DNA, 771 bp, Chionanthus retusus
atgccaaaagcccactttgtcgccgttcacggcgttggacatggtgcttgggtatactataaattgaaacctagaatcgaagcagccggtcatcgcttcacggccctaaatttagctgcagcaggagtaaatgaaaaaaagctagaggaagtgaggtctctatctgaatatactactccgttgctagattttctagcatctgttccagaaaacgaaaaagtaatattgatcggacattcaggtggtggtatgagcgccgcggttggcatggaaaaatatcccgaaaagatactagttgcagttttcttaaacgccattatgcctgattcaaagaattcgcctagttacgtactcgagcaatactctggtaagacccctctcgatgcatggttagatacacaattctctgcatatggtgatccacctattactgctctaacggtgggcccaaaatttatatcaaattcactttatcatttgagccctgtagaagaccatgcattgggcgaactgttagtcaggagaggaagtttgttcatcgaagacttattacaagccgataaattcacagatgaaaactttggttcagtaccgagggtttatttcgttgccacagaggatagaactattcctgctgaatttcaaagatggatgatcgaaaacaatccagtagaagaggttaaggagattaaaggagcggatcatatgcccatgttttcacagcccgacgagctttgtaaatgtttggttgaagttgctgaaaagtacgct

SEQ ID NO: 1546 - DNA, 765 bp, Allamanda cathartica
atgaaacattttgtcgcagtgcacggcgcaggccatggtgcctgggtttattacaaattaaaacctcgcattgaagctgctggctacagatttaccccggtgaacttggcagcatccggtatcaacgaaaagaaattggtggaagttcgttcgttggatgagtacactaaaccactcctcgatgttttagcttctgttccagaagacgagaaggtcatcttgattggacactccggtggaggcatgtctgcagcagtagggatggaaaagtttccaaagaagatctcgatagctgtcttcctgaatgctatcatgccagatgccaaaaatcgcccatcctatgttttagaggaatacaccgcaagaacgccccctgatgcttggaaggattcacaattcagtgtttacggtgatcctccaataacttctttaatctgtggtccagaatttatatcttcgacattgtaccatcttagtccaattgaagatcatgctttgggaaacctactagttagaccgggtagtttgtttatagaggacttactaaaggcagaaaaattcacagaggaaggctttgggtctgttcctagagtttacgttatagctgcggaggataagactatcccacctgaattccagcgttggatgattgaaaataatccggtaaaagaggtaaaggagattaagggagccgatcacatgcccatgttttcaaaaccagacgagctctgtaagtgtttattagagattgccaagaagtatgca

SEQ ID NO: 1547 - DNA, 780 bp, Phyla dulcis
atggccgcagctcaacctaagcatttcgttgcggttcacggtgttggtcatggcgcttgggtttattacaaactaaaaccccgtgtggaagccgcaggccataggttcactccaattagtcttgctgcggctggaaatgacggtaagaagatagaggaggtcagaacacttcacggatatacaacccctttgcttgaagctctagcagccgtacctgaaggagaaaaagtgattcttgtcggtcattccggtggaggataccccgccgcatacgctatggagaagtacccggagaaaatctctgttgcggtattccttaatgcattaatgcccgattctaagaataaaccatcttatgtgatagatgaatatttagcgaggactccaatggaagcatggatggatacacaattcttgcctcttggagatccaccaataacgggtttattatgtggtcccaaatttatttctgagtcactatataatcttagcccaattgaagaccaagttctgggccacttgtcagtccgacccggctcccttttcatggaggacttggccactatggagaagttcagcgatgaaaaattcggttccgtgcctcgagtctatgtaatagcagcaggtgatgttacgataaaaccagagttccaaaggtggcaaatagaaaataatccagtcaaagaggtgaaagttattgaaggtgcagatcacatgccaatgttcacaaagcctgatgaattatgcaaatgtctagttgaaatagccgaaaaacacggt

SEQ ID NO: 1548 - DNA, 771 bp, Ligustrum sinense
atgccgaaagctcattttgttgctgtccatggagtcggtcacggcgcttgggtctattataaacttaagccaagaatagaggcagctggacacaaattcactgccttaaacttggccgctgccggtatcaacgatcgcaaactagaggaagttaggtctttaagtgagtataccacccccttgttagactttttagctgctgtaccagagaacgaaaaagtcattttaataggtcactcaggtggtggtatgtccgctgctgtcggaatggagaaataccccgaaaagatcgccgtcgctgtttttttgaatgctatcatgccggattccaaaaactcaccatcatacgtgcttgttcaatattctggcaagacaccaccagatgcttggttggacacacagtttagcgcctacggagacccgcctataaccgcgttgactgtggggccaaaatttatctctaactccctgtaccatttgagtccagttgaagaccatgccttaggagaattacttgtcaggcctggctctttgtttattgaggacttgctccaagctgacaaattcaccgatgaaaaatttggtagcgtaccacgtgtctatattgttgccacggaagaccgtaccattcctgccgaatttcaaagatggatgatcgaaaacaaccccgtgaaagaagtaaaagaagtaaaaggtgcagatcacatgccaatgttctctcaacctgacgccctttgcaaatgtttagtcgaagtagccgaaaaatacgct

SEQ ID NO: 1549 - DNA, 783 bp, Pyrenacantha malvifolia
atggagtcaagcaaacaaccaaaacattttgttgcagttcatggggtatgtcatggagcttgggtttattataaaatcaagcatcttatcgaagctgccggccatagattcacaccagtaagcatggctgcttccggtaactcacaaaagaagttggaagaggtctcgtccttgcatgattacactttacccctcttggaggttttaggcagcttaccagaaaatgaaaaagtcatcctagttggtcattccggtggtgggatgtcagctgccttgggtatggagaaatttccagaaaaaatttcagtcgctgtatttttaaatgccataatgccagacacaagccatggcccgtcatttgttctggaacaatacaccgcaagaactcctttaaacgcctggaaggattcgcaattctctgcgtacggagaccccccaataactagttttgttgtgggtccagaatttatttctagtacattataccatctctcacccattgaagatatcactttgggcaaattgagcgtgagacctggaagtttgttcatggaagacgttatgaaggctgatcgtttcaccgaggaaggattcggatccgtcaaaagagtttatgttgtggctaccgaggacaaaactatcccccccgcctttcagagatggatgatcatgaataatcctgttgaagaggtcaaggagattacaggtgctgaccatatgccaatgttctctaaacctaatcaactctgtaaatgtttactagacatcgctgagaagtacgca

SEQ ID NO: 1550 - DNA, 777 bp, Sambucus canadensis
atgggtaaagaccagaagcattttgtagctgttcatggtgtttgtcacggggcatgggtttattataaagttaaaccaagagttgaggcagcaggacaccgattcacagcagtcaacttggcagctgcaggagttgatcagactaaaccagaagatgttaagagcttgtgtgattacaccaaaccattgctagacgttttggaatcaattccggaaggtgaaaaagtaatactgattgggcactcaggcgggggtatgtccgccgcagttgctatggataaataccctcataaaatatctgtcgcagttttcttgaatgccattatgccagatactgctcatcctccttcttttgtactagaaaagtactctggtggtaccccacttgatgcctggaaggacacacaattttcccaatacggggaacctccggttactgctttactagtgggtcccgaattcatctcatctactttataccatctcagtcctgtagaagatcatacgttaggaacgttgctggtaagacctgggagcttattcattgaagatctagttaagctggaaaatttcaccgagaaaggatttgggtccgtcacgagagtctacgtggttgcaacagaagataagacaattccacctgaatttcaaagatggatgattgagaataatcccgtggcagaagttaaagaagtagaaggtgccgatcacatgccaatgttctccaaacccgatcagctatgcaaatgtttagtagaaattgcggaaaagtacgcg

SEQ ID NO: 1551 - DNA, 783 bp, Leonurus japonicus
atggaagtcctgtcgaaacccaaacattttgtagccgtacatggggttggacatggttcatgggtttactacaaactcaagcctagaattgaagctgcaggttatagattttcaccgataagtcttgctgccgctggtaacaacggcaagaagctcgaggaagtccgatctttacatgattatacagagccactattagaagctcttgcggcagtcccagaaggggaaaaagtagtattagttggtcactctggaggtggttaccctacagcctttgccatggagaaatatccggaaaaaatagctgtcgccgtttttgttaacgctcttatgcccgactcaaagaacagaccttcatatgtgattgaagaatatttaggcaggactccacaggaaaactggatggatacacaattcctgtcttatggtgaccctcctatcagtgctttactatgtggtcctaaattcattacagattccctttacaatttgagcccagccgaggatcatgcattgggacaattgagtgttaggccaggttctttgtttatggaagacttaatgacaatggaaaaatttagtgacgaaaaatttgggagtgtcccacgagtttacgtaattgctgccgaggataagaccattccgcctgagttccagagatggcaaatagagaacaatccggtcgcagaggttaaagaaatcaaaggcgctgatcacatgccaatgtttacgcaacccgacgctttggcaaagtgcttagcagagattgccgaaaagtatgcc

SEQ ID NO: 1552 - DNA, 777 bp, Ajuga reptans
atggcaggtaccccgaagcaattcgttgccgtccacggcgtggggcatggagcatgggtttactataaattaaagccgcgaatggaggccgcgggctttcgtttttctccaattagcctagcagctgcaggtaataacggcaaaaaaatcgaagaagtgagaacattgcatgactacaccaccccactgcttgaagctctagccgctgtacctgaagatgaaaaagttatactgattggtcattcaggcggtggttatgcagcagcatacgctatggaaaaatacccggaaaagatttcagtcgcagtcttccttaacgcgttgatgcccgattctaagaatagaccttcttatgtaatagatgagtatttagcacgtactcctccggaaaactggatggatactcagtttcctactttcggtgacccgcctataggtggtctgatatgcgggccgaagtttatttcagaatctctttataacatttcaccaatcgaagatcaagcactcggtcatttgtctgttcgaccaggctctttgtttatggaagatttagccacgatggaaaagttctccgacgaaaaatttggaagtgtgccaagagtttacgtgattgctgctgaagacaaaactattccccccgatttccagaaatggcaaattgaaaacaatccagttgccgaagttaaagaaatcaaaggggccgatcacatgcctatgtttactcagccagatgccttagccaagtgtctggctgagatagctgaaaaacatgct

SEQ ID NO: 1553 - DNA, 783 bp, Paulownia fargesii
atggtcggaggttcacagcctaaacatttcgttgcggttcacggagtcggacacggtgcttgggtttattataagctcaagccgagaattgaggcagcaggatacagatttacgcccgtatcgcttgcagcagccggtaataatggtaaaaaattggaggaggtgagatcacttcatgattacaccacaccattgttggaggtgttggcttcagttcctgaaggagaaaaggttatcctaatagggcattcaggaggtggttatccggcagcttacggtatggaaaagtacccagaaaagatatctgttgcagttttcttgaacgctttaatgccagattctaaaaacagaccatcttatgtcattgatgagtatcttgcccgtactgcgcctgaggcttggctcgatacgcaatttcctacttatggggatcctcccataacagctctggttgtaggtcctaaattcataagtgagagcctatataacctatctccaattgaagatcaagttcttggtcacctttcggttagacccggttcattgtttatggaagatctggctaccctggataaattctctgatgaaaagtttggttctgtacctagagtttatgtcatagccgctgaagataagaccattccaccggattttcaaaggtggcttattgaaaacaatccagttaaagaagtcaaagagattaaaggtgccgatcatatgcctatgtttacacagccagatgctttgtgcaaatgcttggtcgaaattgcagaaaaacatgca

SEQ ID NO: 1554 - DNA, 789 bp, Caiophora chuquitensis
atggcacttgaaaagcaacaaaaacatttcgtcttaacgcacggagcatgccacggcgcttgggtttggtacaaggttaaaagtaaaattgaagccgctggtcataggtttaccgcggtaaatttgggtgcttcaggggtgaatacaaaaaaattagaagaagtttggagcttgaaagattacaccgaacctcttctagaggttttagggagtattcccgaggatgagacagttatattggtaggtcattctgggggcggcatgtctgtcgctctggctatggaaaagtatcctaacaagatttcggttgccgtattcttgaatgcgattatgccagattccacaaatccgccttcctttgtgttggataaatactctggaggcactccacccgaagcttggaaggacactcaatttttatcttttggggacccaaagaaaccacagaccggcctaatcgtcgggccacaattcttaaagtccaccttataccatctatgttccgacgaggattttactttgggaaccttactggttcgtcccggcagcttatttctagaggatttgccgaccctagaaaagttttcggatgaggggtttggatcagtcaagagggtctatattgtctgtgatgaggacaaaacgataccggtagaatttcaacgttggatgatagaaaactctcccgtatcggttgttatggaaattaacggtgctgatcacatgccaatgttttcgaagcctaatgaagtatgtcaaagtttattagaaattgctgacaagcacgca

SEQ ID NO: 1555 - DNA, 783 bp, Plantago maritima
atggtaggtgaagttcaacctaagcaattcttggctattcacggtgtaggtcatggatcttgggtctattacaaagtgaaaccaagaatggaagcactaggatataaatttactccaattagtttagccgctgctgggaactcaccgaagaagttggaagaggttcgatcattgcacgactacactacaccattacttgaagctctagccgctgtcccagagggagagaaggccgttctcattgggcattctggaggtggttatgcagctgcttatgctatggaaaaatatccagaaaaaattgcagtggcagtattccttaatgctctaatgcctgacaccaaaaatagaccaagtttcgtcattgatgagtacttgaaaagaactccaatagaagaatggatggacactcagtttcccacatacggcgaacctccaataacagctctcatctgcggaccaaagttcataagcaaaagcttgtataatctaagccccatagaagatcaagcacttgggcatttaagcataaggccaggttcgttatttatggaggacttggcagtgcttccaaatttcactgaagaaaaatttgggtcagttccacgagtttactttattgccgctgacgataaaactataaaacctgacttccagagatggctcatagaaaacaatccagttaaagaggtaaaagaaataaagggagctgaccatatgccaatgttcacacaacctgacgaactgacaaagtgtttggcagaaattgctgaaaaatatgct

SEQ ID NO: 1556 - DNA, 783 bp, Antirrhinum braun
atggttggtgaagtccaaccgaaacatttcgtggctgtccatggcgtcggacatggtgcatgggtatactacaagttgaaacctaggattgaagctgctggccataagtttactccgataagcctagctgccgcaggcaattcaaacaaaaaaatagaggaagtcagaacccttcacgattacactgaacctctgcgtgaagctttggctgctgttccggaaggcgagaaggtaattttgataggccatagtggaggcggctatgctgccgcctttggaatggaaaagcatcccgagaaaatcagtgtagctgtgtttttaaacgcattgatgccagattctaaaaacagaccgagctatgtcatcgaagaatacttgaagaggacgccacccgaagcctggatggatactcagtttcctacctttggagatccacccattggtggtttgttgtgcgggccaaaattcattagtgaaagcctttacaatttaagtcctatagaagatcatgctcttggtcatttaagtatcagacctggatctttgttcatggaggaccttgcgacaatggacaatttctccgatgacaagtttgggagtgttcctagaatctatgtcattgcggctgatgacaaaacgattcctccggaattccagaagtggcagatagagaataatccagtagtcgaagtcaaggaaataaaaggtgccgaccacatgcccatgttcaccaaacctgatgaattatgtaaatgtctggttgagattgccgaaaagtacgct

SEQ ID NO: 1557 - DNA, 783 bp, Cyrilla racemiflora
atgggtggtgttatgcagcagaagcactttgttgctactcatggcgtcgggcacggttcctgggtttattataagctcaagcctcgcattgaagctgctggtcatagactgactcctgtggatcttgctgcaagtggagttaacgaaaaaaaattagaagaagtcttgactttggatgaatatacaactccactactcgaagtgttagcctcgatccctgagaatgaaaaagtcgtgttaataggtcattcaggtggaggaatggctgccgcagtcggtatggaaaagtaccctgagaagatagccgtagcggttttcctgaacgccataatgccagactccaaaaatcgtccgagttatgtccttgagcaatacagtgccaaaactcctttggacgcatggctcgacacgcaattctcaacctacggttgtccttctatcacttctttgttggtcggtcctaaattcatatcatctagcctataccacttgtcgccagtcgaagatcaagctcttggtactctgttaatgagacctggctctctttttattgaagatctattgaaggctgataacttcactgatgaaaagttcggttctgttcctagagtttttgtagttgcgactgaagataaagttatccccccggagtttcaaagatggatgattgaaaataatcccgttaaagaagttaaagagataaaaggttccgaccatatgcccatgttctcgaaacctgatgaattgtgtcaatgcttagtcgagattgctgaaacctatgca

SEQ ID NO: 1558 - DNA, 792 bp, Hydrangea quercifolia
atggaagtagtcaaacaaagtaaacattttgtgttagttcacggttcatgtcacggtgcatggtgttggtacaaaatcaaacccagactcaaatcggctggtcatagagttacgacccttgatttggcagcatccggaattaacacaaaagaagtacaagaaatttacacattgagggaatattctaagcccttattagagattatggaaagcattgaggaagatgatcaaaaagtaattctggtgggacattcttatggagggatgtcgttagctctggcgatggatatgtatccccacaagatttccgttgcggtctttatggcagcttttatgcctgatacggttcatagaccttctcatgttttagataaatacaccggtgggacaccgttggaagcttggaaggatactcaatttttggcatttggcgatcctgagaagccacagacaggtttaatttttggtccagagtttctcaagaccactctataccatctctgttcagttgaagacttcacgttgggtacgttgctcgtacggccagggtcactttttatggaagatttacatacgcttggtaagttaaccaatgaaggttttggtagcgtcactagagtctatatagtttgcgatgaggacaaaaccattcccgcggaatttcaacgatggatgatagaaaataatccagttacagaagttaaagaaatcaacggtgctgatcacatgcctatgttctcaaagcctaatgaagtattccaatgcttattagaaattgccactaaatatgct

SEQ ID NO: 1559 - DNA, 786 bp, Cinchona pubescens
atggcggctacaaatcaacaaccaaagcattttgtggctgtccatggagtgtctcacggcgcttgggtatattataagctgaagccaagaatcgaagccacaggacataggtttacaccagtagacctagctgcttctgggaaaaatgaaacaaagcttgaagaactccattcaatcactgattatactaaaccgctgcttgaggttttagcaagcgttccagaaaatgaaaaagtcgtgctcgttggccattcgggtggtgggatggccgcggcagtaggtatggaaaagtacccacataaaatttctttagcaatttttttgaatgctattatgcccgacaccaaaaacagaccttcgtacgttttggaacaatactctgctaagacacctcttgacgcttggaaggatactcaattctttgtttacgacgatcctccaattaccgcaatgaccgtgggtcctgaattcatttcttcaacattgtatcacctttctcccaaagaagatcacgcactaggcaaattactagttcgacctggtactctcttcatggaggatttggtgaaactagacaattttaccgataaaggatttggttctattcctcgtgtatatgttatcgcaggtgacgacaaaaccatcccacctgactttcaaaggtggatgattgaaaataatcctgttaaggaagttaaggagattaaaggtgccgaccacatgccaatgtttactaaaccggatgtattatgtcaatgtttgctagaactagctaataagcatgcg

SEQ ID NO: 1560 - DNA, 789 bp, Actinidia chinensis
atggaagttacaaagaagaagttgcatttcgtgggaactcacggtatgtgccaaggggcctggatatggtataaggtaaagccccgggtagaggctgctggtcacaggttcacagctgtcgatttaggtgcttgtggtaggaacccaaagaccttagatgaagtccggacattatacgattacaccttgcctctcttagaggcactagcttctattccagaaaatgaaaaagttgttttggtgggattttcaggggggggattctctgccgcagtggcgatggagaagtatccgaaaaaaattgctttagcaatctttttaaatgcaacaatgccagatacaactcatgaggctagctacgtccttgaccaatacgcattagggatctcaggtgacacgtggaaagatacacaattctcaacttacggtgatccaaatgagccacttacatcattattggttggacctaagttcatgaagtcaactacctttcaacactgttctattgaagacttgacattagctaccatgctagttcggccaggttcattattcatggaagacttaaaaaaagcaaagaagtttactgatgaaggtttcgggtctgttaaacgagtctgcgtgttgtgcgaacaggatctttgtttaagtgctgagtttcaacgttggatgatagaaaataatcccgtagaagaagtagccgcaatagagggagcagatcacatgattatgttctctaatcccgaaaaattgtgcgaagttttactggaaatggctcagaaacatact

SEQ ID NO: 1561 - DNA, 777 bp, Swertia japonica
atgtcctcaaataaacacttcgtagcagtccacggtgtaggtcacggagcttgggtttattataaattgaaaccgcggatagaagccgcgggataccgatttacagcaatagatttggcagctgccggagtatcatcgaaaaagctggaagacattcactctctcaacgaatattgtgagcccctattcgacgtgctttccagtgttccagaaaatgaaaaagtgatattagttggccatagcggtggtggattgagcgcagcattgggaatggagaaatattcagaaaaaatttccgttgcagtatttttaaatgctattatgcccgatactaaaaacagaccttcttatgtgatggaggaatacacggctcgtaccccaattgaagcgtggaaagacaccaagttctcagcctatggtgaacctcccataacagccctgttatgtggacctgagtttatttctacctcactctatcatcttagtccagttgaagatcatacgctcggtaagctattggttagacctggagcattgtttgtcgaagatctaatcaaaggtgaagttaagtttacagaagaagggttcggatctgtaccaagagtatatgtggttgctactgaggacaaaactattccagctgagtttcaacgctggatgatagaaaataatcctgttaaagaggttaaagaaatcgagggagctgaccacttgccacaattcagtaagccagatgaattatcaaaggttttagtagacattgctaagaattacgga

SEQ ID NO: 1562 - DNA, 783 bp, Sesamum indicum
atggcagccgcagctaaatctaagcatttcgtagctgttcacggggtcggtcatggcgcatgggtatactataaacttaagcctagagttgaagcggctggataccaatttacaccggtatcgcttgcagcagccggaaataacggtaagaaattggaggaagtgcgaagccttcatgactacacaacacctttgttagaagtattagctgccgtaccggaaggtgaaaaggtaattttaataggccattcaggaggcggatacgctgctgcctatggcatggaaaaatatcccgagaaaatctccgttgcagtctttctgaatgctctgatgcctgattctaaaaataagccttcttacgttatcgacgagtacctggcgcgaactccaccagaagcttggatggacactcaatttccaacctacggcgaccctcctattacagctcttgtagtcggtccaaaatttatctccgaaagtttatacaacttatcaccactggaggatcaagctttgggtcacttgtctgtgaggccgggttcacttttcatggaagatctagcaaccatggataagttttccgacgaaaagttcggtagtgtgccaagagtgtatgtgatagccgcagaggacaaaaccattccgccatcattccaaaaatggcaaatcgagaataatccagttgttgaggttaaagaaatcaagggagccgaccatatgccgatgtttacccaacctgatgcgctgtgcaaatgcctagtagagattgctgaaaaacatggt

SEQ ID NO: 1563 - DNA, 966 bp, Isodon rubescens
atggcctcaagggagggcgaagttgtttgtgttacaggtgggtcaggttttataggctcctggatcgtgcatttactgttacgtagaggctacactgttcgggctacggtgaagaatttaggagatgagcgcgaaactaaacatctggaagctattgaaggagccgacagtagactccgattgtttcaaattgaccttttggattatgattcggttgcagccgctgtgtcgggcgccgcaggcgtcttccatttggctagcccttgcgtaatcgatcaagtgcacgacccacaaagagagttgttagaccctgcaattaaaggtacgatcaacgtcttaaccgcagccaaggcacttggcgtccgtagggtagttatcacatcatcgatttcagctatgattccctcttcaaataatttggctgatgttggtgaggactcatggatcgatgaagattattgcagacaaaatggtctgtggtatcccttaagtaaggcactagccgaaaaagcggcttggaagtttgctgaggagaatggtctggatattgttgtcgttaacccgggtatggttgtcgggcctattaacccgcctgctttaaattcttctatgcaattgatgctacgagttttacaaggaaatgatttttttgaaggtttctttatggctttggtccacgttaaagacgtcgccttagcacaccttcttttatatgaaaatacctcggccgctggtaggcatctatgcgtagaatcactaagtcgttatgatgatttcgctgagaaaatgggcaagctgtatcctgaatacaaactaccccgtccttcatctaaggatactcaacacggctctctcaagtcagatgctgctttgaaaaaactaaaggatctaggattggaatttataccactggagcagatgataaaagacagcatagagtcattaagatccaaaggctatatctct

SEQ ID NO: 1564 - DNA, 966 bp, Prunella vulgaris
atggctaacaaagagggtgaagtggtttgcgtaacaggtgcttcaggtttcataggtagttgtctagtgcatcatttaatcaacaggggttacactgtaagagccaccgtaaagaatctagcagacgaaagggaaactaaacatctagaagcaatagaaggagctcatagtagattgcacctgttccagatcgatttattagattatgatagtatagctgccgcggtctcaggtgccgctggggtttttcatctggctagtccatgcgttattcatagggttgatgatccccaacgggaattgttagatccagccattaaagggacagtaaatgtactgaaagcggcgaaaaacctcaatatacgcagagtagtcgtgacgagttctatttccgccatgatagctagttcttccagtttagctgatgtaggtgaagattgttggattgacgaggatttctgcagacaaaatggcttttggtacccattatctaaagctctggccgaaaaggccgcatggcggttcgctgaggagaacggtttggacattgtcgtaataaaccctggcatggtagttggcccaatcctgccacccgccttgaattcttctatgcaactaatgttggatgtgttgcagggaaaggatttttcggaaggcttttttatgaccctggtgcatgtgaaggatgtcgctcttgcccaaatcctgttatatgaaaacaccagtgccactggccgtcacttatgtgtcgaatcgctctctagatacgatgattttgccgagcagatggaaaaactttatcctgaatacaagttgccaagattctctaatgatcatacacaggacgaatcactaaaatccaacgccgcattgaaaaagttgatagacttaggtatggaatttacgccacttaaacaaatagtaaaggaatcaatagaatctttgaggtctaagggatacttgtcc

SEQ ID NO: 1565 - DNA, 963 bp, Agastache rugosa
atggcaaataaagaaggtgaagttgtctgtgtaactggaggtagcggatttattggaagttggttagttactcttttgttaaggcgtggttattctgttagagccacagtcaaaaacctaggtgatgaaagggagactaagcatttgggcgcgatcgagggtgcagatagtagattgagattatttcaaatcgacttgttggattacgattctatagtagctgcagtcgccggcgccgcgggtgtctttcacctcgcttccccctgcgtaattgatcaggttagagacccacagagagaattactagatccagctataaaaggtaccctgaatgtattgacggcagctaaaaatttggatgtaagacgagtagtggtgacttcaagtattagcgcgatgattgcaagcagtaattccttggctgagactggtgaagactgttggatcgatgaggattactgtcgtcagaatggtttgtggtatcctctgtccaaagcattggctgagagagccgcatggaaatttgctgaagagaatggactagacattgtagttgttaatcctggcatggttgttggtccgattttgccaccagccttgaatagttctatgcaaatgattttgcgtgctttacagggtaaagattttccagagggtttttttatggctcttatccacgtgaaagatgttgccttagctgaaattttgctgtatgagaacacatctgcagcaggccgacatttatgtgcagaatcattatcgcgctacgatgatttcgcggaacaaatggaaaagttatatccggaatacaagctgcctagattcgcaaacgacacgcagagaggttcacttaaatcaaatgccgcattaaaaaagttgatcgatttgggcttggaattcacccctctagaacaaatcgttaaagattctattgaatcgctaagaagtaaaggttatatttct

SEQ ID NO: 1566 - DNA, 966 bp, Melissa officinalis
atggtaatatccgaagagggagaggtggtctgtgtcaccggagcatcagggtttataggttcttggctggttcacttattgttgaggagaggctatactgttagagctactgtcaaaaatataggagatgaaagagaaacgaaacatcttgaagccttggaaggcgctgattctagattgagattattccagatcgatttgctagactacgacagtattgttgctgcagtatctggtgcggcaggcgtctttcacttagcatccccttgtataatagatcaagtggaagatcctcagcgtgagcttctggatcctgctattaagggtactatcaatgtattaactgccgctaagaacttgaatgtaagaagggttgttgtgacttcgagtatttcagccatgatagcctccagctcttcgttagcagacacaagtgaggattgctggattgatgaagactactgcaggcaaaacggtctatggtaccccttgagcaaagcgttggctgaaaaggctgcttggcagttcgcaaaagagtcaggtttagacatagttgtagtacatccaggtatggtcgtaggtccaatcatcccaccggcactgaactctagcatgaggctaatgttacatgtattacagggtaaggacttttcagagggattcttcatggctttagtgcacgtaaaggacgtcgccctcgcagaaattatgttatatgaaaacactagtgcagcaggcagacacttatgtgtcgagtccttgtctagatatgatgattttgcagagcaagtagccaaactgtatcctgaatacaaacttccaagatttttaactgacacccaaagagaatctccgaaatcaaatgccgcgtcaatgaagttagttgatttagggatggtttttactcccttagagcaaattgttaaagattcaattgaaagtttaagatccaagggatacctctcc

SEQ ID NO: 1567 - DNA, 963 bp, Micromeria fruticosa
atggtaaataaagaaggggaagtggtttgtgtcactggaggttcaggtttcattggtagttgggttgtgaatctgttattgcgtagaggatacacggtccatgctacagttaaaaatttgggcgacgaatcagaaactaaacacttagaggccttggaaggtgcagattcaagattaaggttatttcagatcgatctattagattatgactctatagtagcagccataagtggggccgctggagttttgcacttggcttctccgtgtactatagtacaagtcgaagatccccagcgagagcttttggaccccgctgttaaagggactataaatgtgctgaccgcggccaagaacttggatgttcgtcgtgtcgtcgtcactagctctatttcggcaatgattgctagttcaaataaccttgctgacgccggtgaagattgctggatcgacgaagactattgtcgacaaaacggtctttggtaccctctttcaaaggtgttagctgaaaaggcggcatggaaattcgcagaagaaaacggcttggacattgtcgtagtcaatcccgggatggttgtagggccaattttcccacccgcgttaaatagttcgatgcaacttatattgaatgtcctgcaaggtaaagatttcccggaaggtttcttcatggccctggttcacgtcaaagatgtcgctttggctctaatccttttgtatgaaaatacgtctgctgctggtcgacatttgtgtgtcgaatcattatcgagatatgatgactttgccaaacaaatggagaaattgtatccggagtataaactaccaagattaagcaacgatactttgctaggtagtccaaaatctaatgccgcttcgaagaagttgatagatctaggtctagagtttactcctctggagcagacggtaaaggatagcattgagtccctgaggtcacgtggttatttgagt

SEQ ID NO: 1568 - DNA, 972 bp, Plectranthus caninus
atggcaagaagagaaggagaagttatctgcgtgactggtggttctggtttcataggttcttggattgtacatttgttgctccatcgaggatataccgtccgagctacggttaaaaatctaggtgatgagcgcgaaactaaacacttagaagctatcgaaggcgctgactctagacttcgattgtttcagattgatctattagattatgattctattgctgctgctgtctctggcgccgctggtgtcttccacttagcgagtccttgcgttattgatcaagttcaagacccgcaacgagaattgttggatccagccatcaaaggaactatcaatgttttaactgctgctaaggagttaggcgttagaagggtggtcattacatcatcaatatcagcgatgatagcaagctccaacaaccttgccgacgttgcagaggattgctggattgacgaagattattgtagacagaatggtttgtggtatcctttatcaaaggtattggctgagaaagcagcttggaagttcgctgaagagaacggtctcgatatagttgcagtccatcccggcatggtcgtaggaccaattatccccccggcattaaattcgtccatgaaattgatgcttcgtgttttacagggagacaacgacttttctgaaggtttcttcctagccttggttcacgtaaaagacgtagctttggctcacctgttgttatacgaaaatacatcagctacaggtcgtcacttgtgtgttgaaagcctatcgtgttatgcagactttgttaagaccatggagaaactttatcctgaatacaagctacctcgtccctcaattgatactcaacatggttctttaaaatcagatgcagctgccgctctgaagaagcttatagatctaggtatggaattcatcccactagaacaaatagtcaaagatagtatagaatctctgaggtccaaaggttacatctct

SEQ ID NO: 1569 - DNA, 960 bp, Rosmarinus officinalis
atggcaaacaaggaaggcgaggtcgtttgcgtaaccggtgcaagtggatttataggttcttggatcgttcatttactattaaggcgtggttacgctgttagggctaccgtcaagaatatcggagacgaacgtgaaactaagcatctggaagcaattgagggggctgcgagtagactaaggctattccaaatagatttattggattatgatagtatagctgcggcaatcagcggagctgcgggggtgtttcacgtggcttcgccatgtacaatcgataaagtcgaagatccacaacgtgagttactagatcccgcaattaaaggaactttgaacgttttgacagcagctaagaatctagatgttagaagggtcgtgattacctcgagtatctcagcgatgatagcttcttccaatagcttggcagatgtcgacgaagattgttggatagacgaagattattgtagacaaaatggtctatggtaccctttatctaaagctttggcagaaaaagctgcttggaagtttgctgaagaaaatggtttggatattgtagtggtaaaccctggaatggttgtcggacccatattaccacctgcattgaatagtagtatgcaattaatggtaagagtcctacagggttgtgatttcttcgaaggttttttcatggctctagttcacgtgaacgacgtcgctttggcccacatcttattatacgagaacacttcggcagccggaagacatttgtgcgtagagtcgttatcttcatatgacgattttgcagagttaatggaaaaactttatcccgaatataaactaccaaggttttgtaaagacaagcacggttcggtcaagagtgatgcggcaatgaagaagttaattgacatgggtatggaatacacgccaatggagcaaatagttaacgacgcaattcagtctttacggagcaagggttacctttca

SEQ ID NO: 1570 - DNA, 963 bp, Nepeta mussinii
atggcggataaggagggagaagtggtctgcgtaacgggtggctcaggttttattggttcttggttggttacattgttactgcgaagaggctatagtgtacgcgcaaccgtgaaaaatttgggcgatgaacgtgagactaaacatttagaagctattgaaggtgcagactcgagattatctttgtttcaaatagatctattggattacgatagtgtcgctactgccgtgggtgatgctgccggagtcttccatttagcctccccatgtaccatagatcaggtgaatgatccacaacgggaattattagaccccgctatcaaaggaactttgaatgtgttaaaggctgctaaaaacctaggagttagaagagttgtagtgacttcatctattagcgctatgatagccagttccaactcattggctgagaccggtgaagactgttggatcgatgaggactactgtaggcaaaatggtttatggtatccggttagcaaggcactagctgaaaaagcagcatggaaattcgcagaagaaaacggcttggacatcgttgtggtcaaccctggcatggttgttgggccaatactacctccagctcttaactcttctatgcaattaatgttgcatgttttacagggtaaggatttttttgaaggtttcttcatgggactagtgcacgtaaaagatgtggcattggctgaaattttgttatacgagaacacttctgcctccggaagatatctgtgtgtagaatcattatcccggtacgatgattttgccaagcagatggaaaagttatatcctgagtataagttaccacgtttttcaaacgacacccaacatgggtcgcttaaaagcgatgctgcgctcaagaagcttagagatttgggaatcgaattcgctcccttagagcaaatcgttaaagattcaattgaatcattaagaagtaagggttatatatct

SEQ ID NO: 1571 - DNA, 831 bp, Catharanthus roseus
atggacttcttagccacgtctgagggtcaattttttgttgcggttgcggtctctttagttgctgtaggggttgcttattttgtgctttcatctaaaaaaccaaaagtttgcttgaacccagaaaattttaaggaatttaagcttgttaagaagacccaacttagtcataatgtggccagtttcaaattcgctttacctactccgacctctgtactgggtctcccaatcgggcaacatatttcttgcagaggcaaagattctcagggcgaagaagttataaaaccttataccccaactacgctagacagtgatgtcggttactttgagttagtaataaagatgtatccacaaggccgcatgtctcaccactttcgtgagatgcaagaaggtgattatatggctgtcaagggccccaaaggtagattcaaatatcaaccaggacaagtcagggcgtttggcatgcttgcaggcggttctggtattacccccatgttccaggtcgctcgagcaatccttgaaaatccaaatgacacaaccaaagtccatctaatttatgccaacgtaaccgcggacgatatcttactcaaagatgaattggaaggattaacgaaaaattaccccgacagattcaaagtttattatgttttgaaccaacctcctgaagtgtggaatggtggggtaggttttgttagtaaggaaatgattcaagcacactgtcctgcaccatctagcgacatcaaaatccttagatgcggaccacctcctatgaacaaagctatggctgcgcatttggaggctataggttatgctccagagatgcagttccagttt

SEQ ID NO: 1572 - DNA, 831 bp, Nepeta cataria
atggactttcttgctacaagtgaaggtcagcttgtggttggtgtcgctgttggcctattggctattggagccgcttattttctgttctcccccaaaaaaccaaaagtatgtctggacccagaaaatttcaaggaatttaaactagtaaagaaaacacaactgtctcataatgtagctaaatttagattcgatttgccaactccaacaagtgtcttgggtttacccataggtcaacatatttcctgcagaggtaaggactcgcaaggcgaggaagtaataaaaccttatactcccacgacattagattccgatgtaggatattttgaacttgttatcaaaatgtaccctcagggccgcatgtcacaccattttagggaaatgaaggaaggtgactacatggctgttaagggacctaaggggaggttcaaatatcagcctggtcaagtgagagcatttggtatgatagcaggtggtagtggcatcacccccatgtttcaagttgctagggcaattctcgaaaacccgaatgaccgcacaaaggtccaattgatctatgctaatgttacttatgacgacatattattgaaagacgaaatcgattctctagctaagaattatcctgatcaattccaagtgtattatgtattgaatcaaccaccagaagtctggaatggaggggtcggttttgtttctaaggagatgattcaagcccattgtccggccccagcgtcggatgtcaaaatacttaggtgtggtccccctcctatgaataaggccatggcagccaatcttgaggccctagaatattcccctgaaatgcaatttcaattc

SEQ ID NO: 1573 - DNA, 843 bp, Arabidopsis thaliana
atggataccgaatttttaagaacgttagataggcaaatactcttgggcgtctttgtggcatttgtggccgtaggagcaggtgccgcctatttcttaacttcttccaaaaaaagacgagtttgcttagacccagagaattttaaagaatttaagttagttaaaagacaccaattatcacacaatgttgctaaatttgtcttcgaattacctacgtctacttcagttctaggcttgcctattggccaacatatctcgtgcagaggtaaagatgggcaaggtgaagacgtcatcaaaccgtacacaccaacgacattggactcagatgttggacgattcgagttggtaatcaaaatgtacccccaaggcagaatgtcacatcattttagggagatgagagtgggagatcatcttgcagttaaaggtcccaagggtaggttcaagtatcaacccggacaattcagagcttttggaatgttggccggtggttctgggataactcctatgttccaagtagctagggcaattcttgaaaatccgaccgataagacaaaagtgcacctaatctatgctaatgttacatatgatgatattttgttaaaagaggagttagaaggtttgactacaaattatcctgaacagttcaaaatattctatgttctgaaccaacctcctgaggtttgggatggaggggttggtttcgtttctaaagagatgatacaaacccactgtcctgcaccagcttcagatattcaaatcctgagatgcggcccgccaccaatgaacaaggctatggctgctaatctggaagctttgggatattcgcctgagatgcaatttcaattt

SEQ ID NO: 1574 - DNA, 831 bp, Catharanthus roseus
atggattttctggcgacctcagaaggacaattttttgtggctgtcgcagtgagccttgtagccgtcggagtcgcgtactttgtgttgagctctaaaaagcccaaggtgtgcttaaatccggagaactttaaagagtttaagttggtaaagaaaactcaactatcacacaacgtagcttcatttaaattcgcattacctacccctacttccgtccttggcctgccgattggtcaacacataagttgtaggggcaaggatagtcaaggagaagaagtcattaaaccttataccccgacgacacttgatagcgatgttggctacttcgagttggtgattaagatgtacccacagggacgtatgtcccatcattttagggaaatgcaagaaggagattatatggcagtaaaaggtcctaaagggaggtttaagtatcaaccgggacaagtaagggcatttggtatgctggcaggagggagtggtattactccaatgttccaggtagcaagagctatccttgaaaacccgaatgacacgacgaaagtacatctgatttacgcgaatgttaccgctgatgatatattactgaaagacgagttagaaggtttgactaaaaattacccagatcgtttcaaggtctattatgtccttaatcaaccaccggaggtatggaatggtggcgttgggttcgtatcaaaggagatgattcaagcacattgcccagcgccgtcatctgatataaaaatacttagatgcgggcctcctcccatgaataaggcaatggccgctcatttggaagcgatcggatacgctcctgagatgcagtttcagttt

SEQ ID NO: 1575 - DNA, 831 bp, Nepeta cataria
atggatttcctggctacgagcgaaggacagctggtggtgggtgtggctgttggactactagcgattggagcagcatattttttgttctcacctaagaagccaaaggtgtgtctggatcccgaaaatttcaaagagttcaagctggtcaagaagactcagctgtcccataacgtcgcaaaattccgttttgatctaccgactcccacctctgttttgggtcttccaataggccaacacatatcctgtcgtggtaaggattctcagggcgaagaggtgataaaaccatacacgcctacgacccttgattctgatgtcggctactttgagctggtaatcaagatgtacccacaaggtcgtatgagccatcacttcagagaaatgaaagagggagactatatggcggtgaaaggtcctaaggggaggtttaagtaccaacctggacaggtccgtgcattcgggatgatcgctggtggctcaggtatcacccctatgtttcaggtcgcccgtgctattctggagaaccccaacgacagaactaaggtgcagcttatctacgcgaatgtcacttacgatgacatcctattgaaggacgaaattgacagccttgccaaaaactacccagatcaatttcaggtttattacgttctgaatcagccccccgaagtttggaatgggggagtgggtttcgtgtctaaagagatgatccaagcacattgccctgcccctgcttctgacgttaaaatattaagatgcgggccgccgccgatgaataaagcaatggcggctaacctagaggcattagaatacagccccgagatgcaattccagttc

SEQ ID NO: 1576 - DNA, 843 bp, Arabidopsis thaliana
atggacaccgaattcctgagaacattagacagacagatccttcttggtgtattcgtagcttttgtagctgttggcgcaggggcggcctattttctgacatcctcaaaaaagcgtcgtgtttgtctggatcctgaaaatttcaaagagttcaaactagtgaaacgtcaccagctaagccataacgtcgccaagttcgtttttgaattacctacaagtactagtgtactaggacttccgattggacagcacatctcttgcagaggaaaagacggccaaggggaggatgttattaaaccctatacgcctacgaccctagactcagatgtcggcagattcgagcttgtgattaaaatgtacccgcagggtcgtatgagtcatcactttagggagatgagagttggcgatcaccttgcagttaaaggaccgaaggggaggttcaaatatcagccggggcaattccgtgctttcggcatgctggctgggggtagtgggattactccgatgtttcaggtagcgcgtgccatactggaaaatccaactgacaagacaaaggtacatctaatttatgccaatgttacatatgacgatatactgcttaaagaggaactggagggtctgacaactaattatcctgagcaattcaaaattttctacgttttgaaccagcccccggaagtctgggacggtggagtaggatttgtatccaaggagatgatacagacgcattgtccagctccggcgagtgacatacagatactgcgttgcggtcccccacctatgaacaaggcgatggccgctaatctggaagcactaggttattccccagaaatgcagttccagttc

SEQ ID NO: 1577 - DNA, 577 bp, Saccharomyces cerevisiae
ttagtaaaaatgtgcgcaccacaagcctacatgactccacgtcacatgaaaccacaccgtggggccttgttgcgctaggaataggatatgcgacgaagacgcttctgcttagtaaccacaccacattttcagggggtcgatctgcttgcttcctttactgtcacgagcggcccataatcgcgctttttttttaaaaggcgcgagacagcaaacaggaagctcgggtttcaaccttcggagtggtcgcagatctggagactggatctttacaatacagtaaggcaagccaccatctgcttcttaggtgcatgcgacggtatccacgtgcagaacaacatagtctgaagaagggggggaggagcatgttcattctctgtagcagtaagagcttggtgataatgaccaaaactggagtctcgaaatcatataaatagacaatatattttcacacaatgagatttgtagtacagttctattctctctcttgcataaataagaaattcatcaagaacttggtttgatatttcaccaacacacacaaaaaacagtacttcactaaatttacacacaaaacaaa

SEQ ID NO: 1578 - DNA, 660 bp, Saccharomyces cerevisiae
ttgctagccttttctcggtcttgcaaacaaccgccggcagcttagtatataaatacacatgtacatacctctctccgtatcctcgtaatcattttcttgtatttatcgtcttttcgctgtaaaaactttatcacacttatctcaaatacacttattaaccgcttttactattatcttctacgctgacagtaatatcaaacagtgacacatattaaacacagtggtttctttgcataaacaccatcagcctcaagtcgtcaagtaaagatttcgtgttcatgcagatagataacaatctatatgttgataattagcgttgcctcatcaatgcgagatccgtttaaccggaccctagtgcacttaccccacgttcggtccactgtgtgccgaacatgctccttcactattttaacatgtggaattcttgaaagaatgaaatcgccatgccaagccatcacacggtcttttatgcaattgattgaccgcctgcaacacataggcagtaaaatttttactgaaacgtatataatcatcataagcgacaagtgaggcaacacctttgttaccacattgacaaccccaggtattcatacttcctattagcggaatcaggagtgcaaaaagagaaaataaaagtaaaaaggtagggcaacacatagt

SEQ ID NO: 1579 - DNA, 668 bp, Saccharomyces cerevisiae
tatagttttttctccttgacgttaaagtatagaggtatattaacaattttttgttgatacttttatgacatttgaataagaagtaatacaaactgaaaatgttgaaagtattagttaaagtggttatgcagcttttccatttatatatctgttaatagatcaaaaatcatcgcttcgctgattaattaccccagaaataaggctaaaaaactaatcgcattatcatcctatggttgttaatttgattcgttaatttgaaggtttgtggggccaggttactgccaatttttcctcttcataaccataaaagctagtattgtagaatctttattgttcggagcagtgcggcgcgaggcacatctgcgtttcaggaacgcgaccggtgaagacgaggacgcacggaggagagtcttccgtcggagggctgtcgcccgctcggcggcttctaatccgtacttcaatatagcaatgagcagttaagcgtattactgaaagttccaaagagaaggtttttttaggctaagataatggggctctttacatttccacaacatataagtaagattagatatggatatgtatatggtggtaatgccatgtaatatgattattaaacttctttgcgtccatccaaaaaaaaagtaagaatttttgaaaattcaatataa

SEQ ID NO: 1580 - DNA, 668 bp, Saccharomyces cerevisiae
ttatattgaattttcaaaaattcttactttttttttggatggacgcaaagaagtttaataatcatattacatggcattaccaccatatacatatccatatctaatcttacttatatgttgtggaaatgtaaagagccccattatcttagcctaaaaaaaccttctctttggaactttcagtaatacgcttaactgctcattgctatattgaagtacggattagaagccgccgagcgggcgacagccctccgacggaagactctcctccgtgcgtcctcgtcttcaccggtcgcgttcctgaaacgcagatgtgcctcgcgccgcactgctccgaacaataaagattctacaatactagcttttatggttatgaagaggaaaaattggcagtaacctggccccacaaaccttcaaattaacgaatcaaattaacaaccataggatgataatgcgattagttttttagccttatttctggggtaattaatcagcgaagcgatgatttttgatctattaacagatatataaatggaaaagctgcataaccactttaactaatactttcaacattttcagtttgtattacttcttattcaaatgtcataaaagtatcaacaaaaaattgttaatatacctctatactttaacgtcaaggagaaaaaactata

SEQ ID NO: 1581 - DNA, 725 bp, Saccharomyces cerevisiae
tttgccagcttactatccttcttgaaaatatgcactctatatcttttagttcttaattgcaacacatagatttgctgtataacgaattttatgctattttttaaatttggagttcagtgataaaagtgtcacagcgaatttcctcacatgtagggaccgaattgtttacaagttctctgtaccaccatggagacatcaaaaattgaaaatctatggaaagatatggacggtagcaacaagaatatagcacgagccgcggagttcatttcgttacttttgatatcactcacaactattgcgaagcgcttcagtgaaaaaatcataaggaaaagttgtaaatattattggtagtattcgtttggtaaagtagagggggtaatttttcccctttattttgttcatacattcttaaattgctttgcctctccttttggaaagctatacttcggagcactgttgagcgaaggctcattagatatattttctgtcattttccttaacccaaaaataagggaaagggtccaaaaagcgctcggacaactgttgaccgtgatccgaaggactggctatacagtgttcacaaaatagccaagctgaaaataatgtgtagctatgttcagttagtttggctagcaaagatataaaagcaggtcggaaatatttatgggcattattatgcagagcatcaacatgataaaaaaaaacagttgaatattccctcaaaa

SEQ ID NO: 1582 - DNA, 453 bp, Saccharomyces cerevisiae
cggattagaagccgccgagcgggcgacagccctccgacggaagactctcctccgtgcgtcctggtcttcaccggtcgcgttcctgaaacgcagatgtgcctcgcgccgcactgctccgaacaataaagattctacaatactagcttttatggttatgaagaggaaaaattggcagtaacctggccccacaaaccttcaaatcaacgaatcaaattaacaaccataggataataatgcgattagttttttagccttatttctggggtaattaatcagcgaagcgatgatttttgatctattaacagatatataaatgcaaaagctgcataaccactttaactaatactttcaacattttcggtttgtattacttcttattcaaatgtcataaaagtatcaacaaaaaattgttaatatacctctatactttaacgtcaaggagaaaaaactata

SEQ ID NO: 1583 - DNA, 500 bp, Saccharomyces cerevisiae
tggaactttcagtaatacgcttaactgctcattgctatattgaagtacggattagaagccgccgagcgggcgacagccctccgacggaagactctcctccgtgcgtcctggtcttcaccggtcgcgttcctgaaacgcagatgtgcctcgcgccgcactgctccgaacaataaagattctacaatactagcttttatggttatgaagaggaaaaattggcagtaacctggccccacaaaccttcaaatcaacgaatcaaattaacaaccataggataataatgcgattagttttttagccttatttctggggtaattaatcagcgaagcgatgatttttgatctattaacagatatataaatgcaaaagctgcataaccactttaactaatactttcaacattttcggtttgtattacttcttattcaaatgtcataaaagtatcaacaaaaaattgttaatatacctctatactttaacgtcaaggagaaaaaactata

SEQ ID NO: 1584 - DNA, 500 bp, Saccharomyces cerevisiae
atcgcttcgctgattaattaccccagaaataaggctaaaaaactaatcgcattattatcctatggttgttaatttgattcgttgatttgaaggtttgtggggccaggttactgccaatttttcctcttcataaccataaaagctagtattgtagaatctttattgttcggagcagtgcggcgcgaggcacatctgcgtttcaggaacgcgaccggtgaagaccaggacgcacggaggagagtcttccgtcggagggctgtcgcccgctcggcggcttctaatccgtacttcaatatagcaatgagcagttaagcgtattactgaaagttccaaagagaaggtttttttaggctaagataatggggctctttacatttccacaacatataagtaagattagatatggatatgtatatggtggtattgccatgtaatatgattattaaacttctttgcgtccatccaaaaaaaaagtaagaatttttgaaaattcaatataa

SEQ ID NO: 1585 - DNA, 333 bp, Saccharomyces cerevisiae
cggagcagtgcggcgcgaggcacatctgcgtttcaggaacgcgaccggtgaagaccaggacgcacggaggagagtcttccgtcggagggctgtcgcccgctcggcggcttctaatccgtacttcaatatagcaatgagcagttaagcgtattactgaaagttccaaagagaaggtttttttaggctaagataatggggctctttacatttccacaacatataagtaagattagatatggatatgtatatggtggtattgccatgtaatatgattattaaacttctttgcgtccatccaaaaaaaaagtaagaatttttgaaaattcaatataa

SEQ ID NO: 1586 - DNA, 152 bp, Saccharomyces cerevisiae
cggattagaagccgccgggcgacagcccaatattatttaaggacctattgttttttccaataggtggttagcaatcgtcttactttctaacttttcttaccttttacatttcagcaatatatatatatatatttcaaggatataccattcta

SEQ ID NO: 1587 - DNA, 600 bp, Saccharomyces cerevisiae
tacagggcgtatatatacataacattttaagataagcaagtgaatgttgattcccgtttcttagtcaacacttctttctattttacccggtcgttaccctattaaaaaaacaacttacaatcattgttcgccccttccatacttactgccactcgcaaaagggcccaaccagggcaattacgtatcaaaaaatcatgacaggctgggtaataaatattcgtgaagaaagaagaaattaaaaaaagaaacgaagaagcaaaaaaaagaaaagactccgtttaatcactttcaaccgcggtttatccggccccacccatgcataaccctaaattattagatcacttagcacgtgaaaaagaaacgtttttaatgttttttttttttttttctttttctttttttgcgttggtgaaaattttttcgcttcctcgagtataattatctcatctcatctttcatataagataagaagttttataaaaaccttttgcatcaaaattttgtagaatatctctttttcttacgctctctttctttccttaattgttttctaaagaaccgtgtatttttctagttcgaatccatcgataacattaaaag

SEQ ID NO: 1588 - DNA, 600 bp, Saccharomyces cerevisiae
gggccagaaaaaggaagtgtttccctccttcttgaattgatgttaccctcataaagcacgtggcctcttatcgagaaagaaattaccgtcgctcgtgatttgtttgcaaaaagaacaaaactgaaaaaacccagacacgctcgacttcctgtcttcctattgattgcagcttccaatttcgtcacacaacaaggtcctagcgacggctcacaggttttgtaacaagcaatcgaaggttctggaatggcgggaaagggtttagtaccacatgctatgatgcccactgtgatctccagagcaaagttcgttcgatcgtactgttactctctctctttcaaacagaattgtccgaatcgtgtgacaacaacagcctgttctcacacactcttttcttctaaccaagggggtggtttagtttagtagaacctcgtgaaacttacatttacatatatataaacttgcataaattggtcaatgcaagaaatacatatttggtcttttctaattcgtagtttttcaagttcttagatgctttctttttctcttttttacagatcatcaaggaagtaattatctactttttacaacaaatataaaaca

SEQ ID NO: 1589 - DNA, 712 bp, Saccharomyces arboricola
ttatttttatttttgtttgatttatccctttcgctatattcaaattatagtagaaagtgttgtcaccacattgcaattcaagctatcctatatttaaacaatttctattcttacttatatgccatgaaggatttcaataacccccagtatcactaccaataaaggaaagcaatatttaatagcttttactactatatggttagctgctcactactactttgcaatgttgaagtacggattacttaccgccgaccggatgacagcactccggcggaatactcttttccgtgcgtcaccgtctgcgccggtcgtgtccctgaactcagatgtgtctcgcaccgccatgctccggacaatgcaaaagtaggaagaggtgcctgtcgtgatggttatagtgaatgcaaaagacgattcccctggccccgcatactttgcactcggtacaatgcattgattagcataatgataataatacgattgagggggtttcctcaccattgtaatagttgcaacataaagtggtggttttcaatatcttgacaaacatataaatgcaaatgtaatattgattaaggtactcagttttttaatcattccctctttatagttttatcacttctagttccacactactatgagctaagaaagagatcaagagcaaatttttaatatctttcggaatactatttatttagggaaatatacaactaca

SEQ ID NO: 1590 - DNA, 710 bp, Saccharomyces bayanus
ccacaaccgcaccagatccggaagacacagagaacaggagattaccagatccagatcagcagaacaccggaacaaaggccggaaggactccaagcagccgcacacctgatttgtagccagtgagttcgcacctaactccaataaagtgcagaataaatcctgcattaacacactgagagtcgggccttggacggccgattatagtccttttgtcgccataaaaagtcccctcgaggtcacgtgcgcgaaggaaccccccctgagcagcttttcgcccagaaatcaaggaaggggcggcaccagcaggcaccggcggccactagtccgtgcggcggggtctgtgacattcaggggccagcgtgcctttagtgatatcgccgcagcgcgcaaactcggagaggaccactccgagcagaagttagttaagcaattctctacgctaaaaaaaaaagtaaagtggattaagctcctactggagagttaagtatgtgtacacttccagatatgcacaacgtgctaggcaactattgttctaaggagagatgtggtgcggagtaaaatgcggaggtagtatggggcttgcagacatatataaagtctagtcattcggctgaaaataaactagaaactacttcttccctttccatctacatcccactcatccaacaatatcaacaatacaatagtaatataatatacacacattcaaa

SEQ ID NO: 1591 - DNA, 668 bp, Saccharomyces cerevisiae; identical to SEQ ID NO: 1580

SEQ ID NO: 1592 - DNA, 700 bp, Saccharomyces cerevisiae
ctaatccaaggaggtttacggaccaggggaactttccagattcagatcacagcaatataggactagaaaatatcaggtagccgcactcaacttgtaactggcaactactttgcatcaaactccaattaaatgcggtagaatcttttcacaaaaggtactcaacgtcaattcggaaagcttccttccggaatggcttaagtaggttgcaatttctttttctattagtagctaaaaatgggtcacgtgatctatattcgaaaggggcggttgcctcaggaaggcaccggcggtctttcgtccgtgcggagatatctgcgccgttcaggggtccatgtgccttggacgatattaaggcagaaggcagtatcggggcggatcactccgaaccgagattagttaagcccttcccatctcaagatggggagcaaatggcattatactcctgctagaaagttaactgtgcacatattcttaaattatacaacattctggagagctattgttcaaaaaacaaacatttcgcaggctaaaatgtggagataggataagttttgtagacatatataaacaatcagtaattggattgaaaatttggtgttgtgaattgctcttcattatgcaccttattcaattatcatcaagaatagtaatagttaagtaaacacaagattaacataataaaaaaaataattctttcata

SEQ ID NO: 1593 - DNA, 694 bp, Saccharomyces cerevisiae
aaaaggtctaacatcctttgagttatgttttcgtcaccacagttaaagagaaaaaaaaataaatagcgggtaaataattgtcatactactgatttgcattgttaccttgtaactttgaacactagccatgcaggttgcttttcctcctttacaccttcccccctgtcgctgttcaaaagtaaatgcaacaacaataaaacgtgggtagaggacgttccctgtatgtactaaaatcatactatcatccgttgaggtcgagcggttctctaatctcaacacacgctgctgcccctgagcttgcgagctaaggacaacagggccaacttgttctttctaggggggagaggcccaacttaggctcggtgaagagaagcgcggagctcacgaaaaggggtggtgtcgcgcactacttttttcgtggggaacttacgtgaaaggggacgttatacttttgttatgtgcagttccaggaacaaacaggggttgaaaagtgtaaaagaaatagttgattctttcagaatctggatgactgccgcccgaacaatgtgggaaatataaaaaggtaccgttaatattgtttcattttcgaagatagtgttccatgtctttcttcagcgttgcttgaacaataggataataagaagaagatcaaccaatctttctcagtaaaaaaagtaacaaaagttaacataac

SEQ ID NO: 1594 - DNA, 700 bp, Saccharomyces eubayanus
ccacagagaacaggagattacaagatccagatcaccaaaatgccggaacacaggctgaaaaactccaagcagccgcacacccgatttttagccagcagattcatacctaactccaatgaattgcagcatatatcctgcaataacacattaaggatcgggccttggacggccgaatatatgattatagtccttttgtcgccaaaaagtcgcctcgaggtcacgtgcatccgaaatcaccccctgagcacttcccgcccagaaaacagggaaggggcggcaccagcaggcaccggcattcactcgtccgtgcggcgtggtctgtgccgttcaggggcctgcgtgcctgtgatgatatcgctgcagggcaccgagtcggagaggaccactccgagccgaggttagttaagccattctctacgctaaaaaataaataatgtggattaagctcctactggaaggttaagtgtttgtacactttcaaacatgcgcaacgcaccaggcaactattgttctgaggagggatgtgatgcggagtaaaatgtggaggaattacggggcttgcagacatatataaactctagccattcggctgaatataagctagaaaccacttcttctctttccatctacatctccctcatctatcaataagaactataatatcaacaatactataatataatatatacacacatttaca

SEQ ID NO: 1595 - DNA, 673 bp, Saccharomyces kudriavzevii
atgttttatttgtagagttcaatttttctctcttacttcaaaaatgtagtgagctgtatcgtcacacttttacggagcgctattatcataagcacggatatttctagtcttacttatatgttagagaaattaccaataccccttagtaccttaaccaaaagagaaaggacctttcaataaggctaaaactcaacgcttagctaccaatttctttgcaatgttgaagaacggatcagaaactgccgagcggacgacagctctccgacgggatgctctactccgcgcgccattgtcttcattagttgtgtccctgaaaacaaacatatctcgcaccgccatgctccgaacaataaagagtgaaagagttgagggcaaactcccctggtttcacgtcccgtgtaaccaatggaacaagttcattcgcatacgatggtatcgaaattagctttgacatgcttctatgatggttctgtacaagtgggtactttccttccagcaaagatataaatgctaaagtaaaattgatatagttgcactgatttttcattccgttcacttttttagttgcatagtttctgattttaggttgctttaagataaagaaaatagcaaacaacaaatatttgatatctgtttatacattactcataaaagataaaaataaaaatctata

SEQ ID NO: 1596 - DNA, 700 bp, Saccharomyces kudriavzevii
taaaccaattttatttgaacttgccccgctaatcgtacagacgtaccagatccaggtcataacggtgccattagaaggccgtagaatagacccactaaagctatcacaggcaaccttgcatccaagtctaattaaacggagcagaatctgttccagtaatgtataaagaattaactaccggaaaagcgtcttccggggcggctcaaccggattacattcttttttcttttttgcggccagcattcgagtcacgtgctcaaatactgaggaaggggttcttccggtaggcaccggcgctcactcttccgtgcggcacactccccgcagttcaggggccatgtgcctgtgagagtatttccgcaggccatagttccggggtggaccactccgagctaatgctaaagtaagcccttcccaacttgaaataggaacaaaagtcaattatgctcctcctgtaaagctaaacgtgtaaagattttagagtgagacgttgttagcagtcgttgttcaagggagggatgagttgaggaataaaatgcggaaaaagtgtgggttagacagacatatataaactctagccattcggctgaaatatatctgagttcatttgtgagaacttttttgattacttgttcatatatccacaagaacaacgactattaaacaatagaaaatagtataataaaaaaagttttttaca

SEQ ID NO: 1597 - DNA, 709 bp, Saccharomyces mikatae
atatgtttatttttttgatttctttagttttcttcccttaacttcgaaatgataaaagagaaaatagccacatcattgcaatccgctactatcctacttttagatatttgtgatcattcttatatatcactgagagatgctaataactgtgttacctctaacaaaagaaggggacttccagtaaggctttccttatttgtctaattgcccattatttcgtaatgttgaaatacggatcagaagctgccgaccggatgacagtgctccgacggaagactgctctccgtgcggtgttgtctgtgcggatcacgttcctgattacggaagcgtttcgccccgccataccccgaacaatgcaaatgcaaggacgcatgcctgtagtggcggttatggtgaacgtgaaataacagttccttgacccctcacatactttgttccgtgtacaacactctggttagaacaatggtgggtttgcggtcaacgttctactcgtcttttactttacttctgtagcagctcaagcaatggttttcagttccttttgcaaacatataaatataaaagtaatgccgcctcaatcgcatagttttcctttattccatttgcacttcttagatttgttgtttgtttgatttgttacataaatatcaaaacatcaataacaattatccaacatctctttatccaaggaaaaaaataacaacatata

SEQ ID NO: 1598 - DNA, 700 bp, Saccharomyces mikatae
ttacggatcagaggagttctccagatctgaatcacgatgatttcggaaaacacagggcaaagagaaacaaggtagccgcactcaattcatcttttagtgactacttttcatcgaaatccaattaaatgcagtagaatctgttcaaaaaaatgtacatagtgtcaattcggcaagctttcttccggaatggcttaaccagaccatatatctcttcattattttcattttaaggtccggagtattgatcacgtgatcaaattcccattgaagggttgccttttaaaggcaccggtagtcactcatccgtgcggagtgttctgcgccattcaggggccaatgtgcctttgagaagattagagcagggagcagactcggggcggaccactccgagccgatgttagttaagccttcccatcttgaaataggaacaaaatggctttatactcctgccagaaagcaaggcatgtgtataccttctcaagaatatacaacgttttggcagctattgttcagaagagggatagatcgtaagctaaaatttggagaaattaaagatttgtagacatatataaactatcagcaattcactgctaaaatacatcttgagagtaactcttcgcttattcatcttgttcacttttcgatgaagaaaaccactgttaagtaaaataaagaataacatataaaaaactttttcata

SEQ ID NO: 1599 - DNA, 673 bp, Saccharomyces paradoxus
ctatgttgatcttttcagaatttttcactatattaagatgggtgcaaagaagtgtgattattatattacatcgctttcctatcatacacatatccatatctagtcttacttatatgttgtgagagtgttgataaccccagtatcttaacccaagaaagcctttctatgaaacttgaactgtacgctaaactgctcattgcaatattgaagtacggatcagaagccgccgagcggacgacagccctccgacggaatattcccctccgtgcgtcgccgtcttcgtcggttgtgtcccttaacatcgatgtacctcgcgccgccctgctccgaacaataaggattctacaagaaatacttgtttttttatggttatgacaggaacaaaataagcagcccactgaccccatatacctttcaaactattgaatcaaattggccagcatatggtaatagtacagttagggttttccttattcctgagacaattcatccgcaaaaaataatggtttttggtctattagcaaacatataaatgcaaaagttgcatagccactttaaatacatttgctcctccaagatttttaatttcgttttgttttattgtcatggaaatattaacaacaagtagttaatatacatctatactttatcgtcaaggaaagaacaaactata

SEQ ID NO: 1600 - DNA, 700 bp, Saccharomyces paradoxus
atttaaggaggttttacggaccagaggagctttccagatccagatcaccggaatatagggcaagagaacatcaagcagcagccgcactcgagttatcactggcaactactttgcatcaaactccaattatatgcagcagaatcttttcttttaaaacgcacttagcgtcaactcggagggcttccttccgggatgacttaaccagattgcaatttcttttccattttacagttaaaaataggtcacgtgatctaaaatcgagaaagggttgcctcatgaaggcaccggccgtcactcatccgtgcggagaggtctgcgccattcaggggtccatgtgccttagagagtattgatgcagagggcatcgtcggggcggaccactccgaaccgacattggttaagcccttcccatctcaagataggaacaaaattgcattatactcctactagaaagctaaatgtgtacatgttctcatgaatatacaacgttctaggtagctattgttgagaggagggatactcagtaggctaaaatgtggggaaaggatgagctttgtagacatatataaacaattaacaattggactaaaagtttggtgttgagaatcgctcttcgctatacatcttgttcacttatcattgagattaaccaacattaagtaaaataaagattaacataatataaaataattttttcata

SEQ ID NO: 1601 - DNA, 700 bp, Saccharomyces pastorianus
accccaccagatccggaagaccacagagacagacgattacaagatccggttcacaagaacaccggaccacaggctagaagggactccaatgtgccgcacatctgatatgcagtaattaagctcgcacctagctccaataagttgcagcatgaatattgcaataacacaccgagagtgttgggtcttgaacggccgattgtagtccgtttgtcgccataaaagtctccttgaggtcacgtgcacctaggattaccccttgagcaactttccgcccagaaatcaaggaagagaggcactggaaggcaccggctgccaccagtccgtgcagtgggtctgtgacattcagggaccagggtgcctttgaaaaaatcggtgcagggcacaaatcggagaggaccactccgagcagaggttagttaagccattttctacgctaaaaaaaaaataaggtggattaagctcctagcggaaagttaagagtgtgtacgcttccagatatgcacaacgtgcgaggcaactattgttccaaagagggatgtgttgcggagtataatgcggaggtcatatggggcttgcagacatatataagctctggccattcggctgaaaataaactaggatctatcatcgtctttccatctatttctcactcatccaacaatatcaacagtacaaataatattatatatacacattcaaa

SEQ ID NO: 1602 - DNA, 700 bp, Saccharomyces uvarum
aaaagaaggggctttccaaaaaccttaatttgttggcgcaaccaaagtgttttccagctggctaatggttcatatgctcaagtgtcctcaaaacgtttacaagctaaaaaggacaagccccccacgcaagcgtgggaactgccgactgaggccaatgccctgtattagttcatgcaaagatatcaacaccatcctttttcttacctttgtaaattaatctcacatacagaagaagtcatgctcctacgggtgttttgtggccgcagcccttgccacgcgggcgaagatcttccgagcggacgtctctcgaccgaagtggccccttagtgggcaaacgtcctagatgttccggtacgccgatactgttcctgaaaaatgtggagtttctccggaaaagagacatgttctttcgggagacagtgctgcggtgacatgaaatagtatcacataagctcaggatgcctatgcaagtggggatttttattgaagcattgtatgtgggagggatgtgtctggcgtaaccttgttttgatataaaacgaacggctgcatgctgcagtcttgagcttttcttgcttattcaattcttgttctacttggtaaatagccgtcaagaaaaatacaaggtaatctctccccttagttattgcattattctaaataaatcaaagagaagatttttttgaagaatagataaaaa

SEQ ID NO: 1603 - DNA, 600 bp, Saccharomyces cerevisiae
aacatatatacacaattacagtaacaataacaagaggacagatactaccaaaatgtgtggggaagcgggtaagctgccacagcaattaatgcacaacatttaacctacattcttccttatcggatcctcaaaacccttaaaaacatatgcctcaccctaacatattttccaattaaccctcaatatttctctgtcacccggcctctattttccattttcttctttacccgccacgcgtttttttctttcaaatttttttcttctttcttctttttcttccacgtcctcttgcataaataaataaaccgttttgaaaccaaactcgcctctctctctcctttttgaaatatttttgggtttgtttgatcctttccttcccaatctctcttgtttaatatatattcatttatatcacgctctctttttatcttcctttttttcctctctcttgtattcttccttcccctttctactcaaaccaagaagaaaaagaaaaggtcaatctttgttaaagaataggatcttctactacatcagcttttagatttttcacgcttactgcttttttcttcccaagatcgaaaatttactgaattaaca

SEQ ID NO: 1604 - DNA, 600 bp, Saccharomyces cerevisiae
ttagtcaaaaaattagccttttaattctgctgtaacccgtacatgcccaaaatagggggcgggttacacagaatatataacatcgtaggtgtctgggtgaacagtttattcctggcatccactaaatataatggagcccgctttttaagctggcatccagaaaaaaaaagaatcccagcaccaaaatattgttttcttcaccaaccatcagttcataggtccattctcttagcgcaactacagagaacaggggcacaaacaggcaaaaaacgggcacaacctcaatggagtgatgcaacctgcctggagtaaatgatgacacaaggcaattgacccacgcatgtatctatctcattttcttacaccttctattaccttctgctctctctgatttggaaaaagctgaaaaaaaaggttgaaaccagttccctgaaattattcccctacttgactaataagtatataaagacggtaggtattgattgtaattctgtaaatctatttcttaaacttcttaaattctacttttatagttagtcttttttttagttttaaaacaccaagaacttagtttcgaataaacacacataaacaaacaaa

SEQ ID NO: 1605 - DNA, 806 bp, Saccharomyces cerevisiae
tttcttgcgtttcttcactgtgatgcttgtgagaatattaggatataccaacgtgcaactctgaaatgtcaaaacggtcgtgtataaataaatgatataccagtaggtgaaatcatctcatttgtctttctaaaaaagtccattacccttaaggttgttgtcacaacccacggagcagttttagaggtgcaaaattgaaagaatggccacattttgagcaattcatcgacaacaagagcttatgattaacttgggttgtgggcaattgggtgtactatgaagcagccaatacctgttttacaacagtattctcagtttcagcttagagatgtgtcaaatcgaaggctagtgtggtgcacggagtttatggcacattggtaagtaatcattgcaacttttttttatttgaggaatatagtaagagagaagctttagtgatggtcaaagaagagaggaatacaagtgagttgtatctaggattttttattacgtgagtgttgttttactttagtcggtaggaatcattgttatttttgtctgtttgtttgtctctatttttgggtacacgtgcgtgtttcttctagtggatggtttgaacgaagcaggttctcaggattgattgattgatctgctttagtgtgtaacgttctgcgactagctttcgttgctaccgatatataaagaaaaaaaggagagcgtgtgtttggagcgtcttaaaccccattggtgagagcctccagtaccatttgcctgttaaaactgtcttgtgtgtggccttgtagagaaggtgaagagggagagtttat

SEQ ID NO: 1606 - DNA, 289 bp, Saccharomyces cerevisiae
ggatagcaggtacatataaattgttacatactaagtcgatgagtcaaaaaagactcttatacatttatacattttgcattattattttttttttccagcggaatttggaattccgctctcaaccgccaaaattcccctgcgatttcagcgacaaagagtcataaagtcatcctcgagaaaccacgatgaaatatataaaaagcccatcttccctgacggaaactggtattttaggaggcataccataagataacaacgaaaacgctttatttttcacacaaccgcaaaa

SEQ ID NO: 1607 - DNA, 1390 bp, Saccharomyces cerevisiae
tcaaccacaagccttttaaaaagaaaaattgaaaaaataataaaaaaatttgaaaaagaaaaaaaaaatcataaaaccaatcttaagaaaaaccaaaaaaaaaccgctaattaaaatctaaaaaattgaaacaagaaactgtatgattagtaactaatatactggcgcggaagggaatgaatgccatttaaatgagatgattatgaaaatatagcgtagagtagatgcgcgaaaccgaggcagaaaagaaaaagagacaagttaaaaattgaatataatgatatatgggcactttcttctgtgctaggaaacggaggtagaaggggatagcaagcttgagcagtaattaaaaaaaaaaaaaagcatattgatagatagctcatttgtagttaactgacgacatttatgtacataattaaaatagaagaaaattttcaaaaaaaattctcctggcgattgttagggacaagaaaacaagccatgttgtaaccaataaatgttacacgccttcaaaataaaaaaaagatggacaaaagagataaatcttttgctttttcttactctgtgttgttgtcaacaaagacaacaaacgtgtgaataatctacgggattcgtttaccataggctacctagaaatggcatagtcatggagataaagtcccatgatattgtaaactaaattgaaagtaaaatcaaggaaaaaacaagtgagattgcaataagcaatcaagagagaaaagttttttgactgattttcgacttgcttttataccgattttgaaaagtcgcggggaaaagctggcaattatttttcattttttttcattagggctagaagttgctaagagcaaacaaactgttacttgaaaggttttcccacgttggtagctacatatgcaagagtcttatgtatcgtatctaagtgccacgtaggggattcccatcatttgatgatttccaaatataatacctgtagagagcggtggagcaaaagtcaaattttaatcgcaactgcagacaagtcaagctgaggaaattgtggatgatctcttgtttcttttgatattcaccacaacagaagtgaagagtgtgattgcggttactactgaccacgaagcaatgcgtttagtagtgaaaagaattactcatactctggaatcgaaattccgttggaaaaattcgctttgtagtgaaaaataaagatgtcaataaagggtattgagaatttccaatggaattatcagcaatagatgatagaaagtagcacagaatttggcttaatggtatataaaccgtagggtcctggtaaaattacatgggaaggatccttaggcagtagggaaaacttatcaggacaattgagttatattaacgtattatatattttaat

SEQ ID NO: 1608 - DNA, 1557 bp, Saccharomyces cerevisiae
tttgttttgtttgtttgtgtgatgaatttaatttgaaactaagttcttggtttttttaacatttaaacaaacaataataaaatgaatagacacacaagaaaaaaactatcttgaatgagtgcaacctttatatattcttccaaacctacaaaaaaattgcaggtctgcgatcactgggtactatcaaaacacatattagcatacgtatgtgttcgtacgtgcggtccgcaaggtctttgtgacagccatgacatgattggattgaatagttcacttcagctgtcaccaccagttttaggccctaacacatcagtcgagttccactaggctttgttagccgtagctgcgttgcaacaactgcgcaaaacgcgcgacttcctgtaaatgccgcagatcacgtggtaaagaaaagaaacaacaggccgacccagtttcgttgtttcttttcattatttctggatgctcttcacaacgtatttcatgacatacttattgaattagtggaagcccaaaacatcattaccctggaaaacttaattgacgtaaattaacttcagttgtcttatgttttttgcatccttaactttagccgcgcagggataatcatatatgtcgaaagagcaactaaacaatacttaaaaacgtgtttgaacttttacgaaagggtaacgacaaataatcattcactggaaaaaccaataaaccataagtaaatgaaaaactgtttcaaccgatgttggtactttccatgtcttaaaagagtacaatttataaattaatgaaaacacagaagtatttagatcggctcaaatgtttttggacattaaaagatcttgaaactgagtaagatgctcagaatacccgtcaagataagagtataatgtagagtaatataccaagtattcagcatattctcctcttcttttgtataaatcacggaagggatgatttataagaaaaatgaatactattacacttcatttaccaccctctgatctagattttccaacgatatgtacgtagtggtataaggtgagggggtccacagatataacatcgtttaatttagtactaacagagacttttgtcacaactacatataagtgtacaaatatagtacagatatgacacacttgtagcgccaacgcgcatcctacggattgctgacagaaaaaaaggtcacgtgaccagaaaagtcacgtgtaattttgtaactcaccgcattctagcggtccctgtcgtgcacactgcactcaacaccataaaccttagcaacctccaaaggaaatcaccgtataacaaagccacagttttacaacttagtctcttatgaagttacttaccaatgagaaatagaggctctttctcgagaaatatgaatatggatatatatatatatatatatatatatatatatatatatgtaaacttggttcttttttagcttgtgatctctagcttgggtctctctctgtcgtaacagttgtgatatcgtttcttaacaattgaaaaggaactaagaaagtataataataacaagaataaagtataattaac

SEQ ID NO: 1609 - DNA, 982 bp, Saccharomyces cerevisiae
taaaggagaataaatcgttttctactttcttctgctgctataataagcacctatgggatctatatagtatttttataacgatagactttataaaagaaaatacctaagtgaaaatttggtgaattttgagataattgttgggattccatttttaataaggcaataatattaggtatgtagaatatactagaagttctcctcgaggatttaggaatccataaaagggaatctgcaattctacacaattctataaatattattatcatcgttttatatgttaatattcattgatcctattacattatcaatccttgcgtttcagcttccactaatttagatgactatttctcatcatttgcgtcatcttctaacaccgtatatgataatatactagtaacgtaaatactagttagtagatgatagttgatttttattccaacactaagaaataatttcgccatttcttgaatgtatttaaagatatttaatgctataatagacatttaaatccaattcttccaacatacaatgggagtttggccgagtggtttaaggcgtcagatttaggtggatttaacctctaaaatctctgatatcttcggatgcaagggttcgaatcccttagctctcattattttttgctttttctcttgaggtcacatgatcgcaaaatggcaaatggcacgtgaagctgtcgatattggggaactgtggtggttggcaaatgactaattaagttagtcaaggcgccatcctcatgaaaactgtgtaacataataaccgaagtgtcgaaaaggtggcaccttgtccaattgaacacgctcgatgaaaaaaataagatatatataaggttaagtaaagcgtctgttagaaaggaagtttttcctttttcttgctctcttgtcttttcatctactatttccttcgtgtaatacagggtcgtcagatacatagatacaattctattacccccatccataca

SEQ ID NO: 1610 - DNA, 1084 bp, Saccharomyces cerevisiae
cttaaaagaaatatttattgtttccgaatttttaatgtcagagatcaagtcagagcggctgcctttaccgtaattttcaattgctaaatacaatgttccttggttatcccatcgccaataatttttatttttaccactgttgaagaagcgaaagaaaaaaaaagggaaaatcaaaacattccctgtgcactaatagaagaaaacaagagactccgtccctctttagtgagaaaattgaccagagatggtttttgtccatcttttcgcaaaaaattagttctattttttacacatcggactgataagttactactgcacattggcattagctaggagggcatccaagtaataattgcgagaaacgtgacccaactttgttgtaggtccgctccttctaataatcgcttgtatctctacatatgttctatttactgaccgaaagtagctcgctacaataataatgttgacctgatgtcagtccccacgctaatagcggcgtgtcgcacgctctctttacaggacgccggagaccggcattacaaggatccgaaagttgtattcaacaagaatgcgcaaatatgtcaacgtatttggaagtcatcttatgtgcgctgctttaatgttttctcatgtaagcggacgtcgtctataaacttcaaacgaaggtaaaaggttcatagcgctttttctttgtctgcacaaagaaatatatattaaattagcacgttttcgcatagaacgcaactgcacaatgccaaaaaaagtaaaagtgattaaaagagttaattgaataggcaatctctaaatgaatcgatacaaccttggcactcacacgtgggactagcacagactaaatttatgattctggtccctgttttcgaagagatcgcacatgccaaattatcaaattggtcaccttacttggcaaggcatatacccatttgggataagggtaaacatctttgaattgtcgaaatgaaacgtatataagcgctgatgttttgctaagtcgaggttagtatggcttcatctctcatgagaataagaacaacaacaaatagagcaagcaaattcgagattacca

SEQ ID NO: 1611 - DNA, 654 bp, Saccharomyces cerevisiae
tggttagaactttcgtgataatttatttttatagttgaatatcttctttctctctcaactctgatccggattgtcgaggtttcaataagttactctgaacaactaatcaaaatatctccttatttctgtagattccttcagttccactttttgcttttcttaattctctttgtatttattcctagcgacgaaaaatgcgagatctcgaccaaaaaaagggggtagggtaataaaattaaccctattatttttgaactttaaaacctataatgtgctaatattttattatacacctcctttttttgtgtttaaaccctgacacattttaagccctatatttacggtattagttgattaaactccgaagcgaaaggaattcggtcattagcggctaatagccgttggggtaaatcacctacaagcaagtacacaagagaacgttggcgttgttaagtcaaagcactaatacattggggctttaagagtgttttataaaggtctgacctgtaaaaattatttaaacaacttgaacaggccttaaagttttcctcattccgctcatcatcactaatattgctctccgtttttgaatacacacttgacactaataagtatcacagaaaaaaagaaaatataataaattagtattgcgat

SEQ ID NO: 1612 - DNA, 659 bp, Artificial Sequence
  engineered Saccharomyces cerevisiae promoter
tttcaaaaattcttactttttttttggatggacgcaaagaagtttaataatcatattacatggcattaccaccatatacatatccatatacatatccatatctaatcttacttatatgttgtggaaatgtaaagagccccattatcttagcctaaaaaaaccttctctttggaactttcagtaatacgcttaactgctcattgctatattgaagtacggattagaagccgccgagcgggtgacagccctccgaaggaagactctcctccgtgcgtcctcgtcttcaccggtcgcgttcctgaaacgcagatgtgcctcgcgccgcactgctccgaacaataaagattctacaatactagcttttatggttatgaagaggaaaaattggcagtaacctggccccacaaaccttcaaatgaacgaatcaaattaacaaccataggatgataatgcgattagttttttagccttattttaattaatcagcgaagcgatgatttttgatctattaacagatatataaatgcaaaaactgcataaccactttaactaatactttcaacattttcggtttgtattacttcttattcaaatgtaataaaagtatcaacaaaaaattgttaatatacctctatactttaacgtcaaggagaaaaaac

SEQ ID NO: 1613 - DNA, 262 bp, Artificial Sequence
  engineered Saccharomyces cerevisiae promoter
gacagcattcgcccagtattttttttattctacaaaccttctataatttcaaagtatttacataattctgtatcagtttaatcaccataatatcgttttctttgtttagtgcaattaatttttcctattgttacttcgggcctttttctgttttatgagctattttttccgtcatccttattttcagcttcatctccagattgtgtctacgtaatgcacgccatcattttaagagaggacagagaagcaagcctcctgaaag

SEQ ID NO: 1614 - DNA, 785 bp, Saccharomyces cerevisiae
attatactatttttttagttgtttgatgttcttctatgtagcatcagaaagaaacaccaacccgaaaattcttcaaacaatcaataccaaaccgctttatataaaaaattaagatgtcgacattccttattttttactgagttcgttaaagttgggtacactcttgattactgtaattgtctctgtatgtccctcaagcccggtacgttgtcattttctagtacgcatcaacggagtgttacatgatagatagaccgagtagaatctatggctatggggtaattaaaaccttaaagctcctttcgctgccatagtaatacgaatagaccttggctatagtaagttgcatctgtaccgtagagattcttgcaactcgcttaaactctcgcttttagataatatttctccttattgcgcgcttcgttgaaaatttcgctaaacacggggtttaagttaaagtttacaggatttatccggaaattttcgcggaccccacacaattaagaattggctcgaagagtgataacgcatacttttcttttctttttttagttcctagcgtacctaacgtaggtaacatgatttggatcgtgggatgatacaaacaacgtaagatgaatagttccttcctcaattcttcttgcagcatcattttcttgaggcgctctgggcaaggtataaaaagttccattaatacgtctctaaaaaattaaatcatccatctcttaagcagtttttttgataatctcaaatgtacatcagtcaagcgtaactaaattacataa

SEQ ID NO: 1615 - DNA, 700 bp, Saccharomyces cerevisiae
aaggcaagcccagaaaaatatcgcaagcacctttggtcttacagtgccaacttttggcctgccgacgttaagagtacaaagctgatggcaatgtacgacaagataacagagtctcaaaagaagtgaaacaatttttcttcaccacattttccattgttccttccccccataactataaacgtatttatgtatatatatttgcgtgtaagtgtgtgtactatagggcaccgtaaagtaataatgcttaattagttactactatgaccatataagaggtcatactgtatgaagccacaaagcagatagatcaatcatgtttaacgaaaactgttaatcgaagattatttctttttttttttctctttcctttttacaaagaaaattttttttgcgctttttgccatcaccatcgcaagttctgggacaattgttctctttcgctccagttccaaggaaagaggtttctgttttacttaatagaaagtgtcatcttgtattttatatctcttctttcttgtgtaaaattctttagttttgattttgtatttttaggacagtgagctacgaagtaacatttttacttaataaccgtttgaagcatagagcaggccctggtaccaccacctaatatctggctttttattcaataaaaactcaaaaaaaaaaatccaaaaaaaactaaaaaaccaataaaaataaa

SEQ ID NO: 1616 - DNA, 700 bp, Saccharomyces cerevisiae
gtgttgttatccgatacaaccggatatttttcttttaatgagtctaaaccgtgatagcttcaggttaatacaatcaaaaaaagctcaaatattcttttaatgccgcgttcacagattccaattgaatacaactaggtagttcattatatgaagcctttgctactatttttcactatagtctgccttcaccttaatgcagacatccacatattttaatcactttaaaataaaaaggaagatatattagaagctatgatccaatctgtaagccagattaaaattcacgaactcttctttcatttgaattgaatgctttgagttggggtagattatcgcaaattactcatcacatttattgactacgaacttgctgatgtcctttttttatttatatttttcttcagtgaagcgattttttttttacacagaccaagacggaaaaaagtagctaaggaagaaaacaaaatcatgaaaaaaatgtgaagtgatcatgcacatcgcatcaacttaaacattggcttagagatatatagagttagagtttacggcaacctttaagcaccaataccttttggcatagtctaaagacctggttcttaattttaaacaaatttaactaaagatttccctatcaaagaagtaacgagttgacagattttctcaaaataaatcgatactgcatttctaggcatatccagcg

SEQ ID NO: 1617 - DNA, 700 bp, Saccharomyces cerevisiae
tcttggggccttaccaccagtggactttcttgctgtttgctttgttctggccattgtttgcgtttatatatttatgttagatgtttttcttattaactagaaagaaagaatataaaaggttgaggaaagagatgtatcccgaagaatacacagtcttttatatatgtatttcaacaaggagccgtggagggtactaaaaagaaaaatcgcccgggcatttcgttatcttccacgctaaaagtcaaggagagatattacggccaggatcgcaaaggtgcagagcaaggaaatgtgagaaattgtgagaacgataatgtatgggacaatgcgaaaatgtgagaacgagagcaaaaatcttttttgtatctccccgccgaatttggaaaccgcgttctgaaaacttcgcatcttcacatagtaaaactgttccgagcgcttctccccataatggttagtggtaaaaaccgaagttgtttactttagcaaatgcccgcgaatacggtggtaaattgccacccccccttccccattcattgggtaaagaccaatttgatggataaattggttgtggaaaaggtctaattctttttcctataaataccgagatattttttctatatgatggtttccgtcgcattattgtactctatagtactaaagcaacaaacaaaaacaagcaacaaatataatatagtaaaat

SEQ ID NO: 1618 - DNA, 586 bp, Saccharomyces cerevisiae
cgtggaaatgaggggtatgcaggaatttgtgcggggtaggaaatcttttttttttttaggaggaacaactggtggaagaatgcccacacttctcagaaatgcatgcagtggcagcacgctaattcgaaaaaattctccagaaaggcaacgcaaaattttttttccagggaataaactttttatgacccactacttctcgtaggaacaatttcgggcccctgcgtgttcttctgaggttcatcttttacatttgcttctgctggataattttcagaggcaacaaggaaaaattagatggcaaaaagtcgtctttcaaggaaaaatccccaccatctttcgagatcccctgtaacttattggcaactgaaagaatgaaaaggaggaaaatacaaaatatactagaactgaaaaaaaaaaagtataaatagagacgatatatgccaatacttcacaatgttcgaatctattcttcatttgcagctattgtaaaataataaaacatcaagaacaaacaagctcaacttgtcttttctaagaacaaagaataaacacaaaaacaaaaagtttttttaattttaatcaaaaa

SEQ ID NO: 1619 - DNA, 346 bp, Saccharomyces cerevisiae
gcaggcgggaaaccatccacttcacgagactgatctcctctgccggaacaccgggcatctccaacttataagttggagaaataagagaatttcagattgagagaatgaaaaaaaaaaaaaaaaaaggcagaggagagcataaaaatggggttcactttttggtaaagctatagcatgcctatcacatataaatagagtgccagtagcgacttttttcacactcgaaatactcttactactgctctcttgttgtttttatcacttcttgtttcttcttggtaaatagaatatcaagctacaaaaagcatacaatcaactatcaactattaactatatcgtaatacac

SEQ ID NO: 1620 - DNA, 695 bp, Saccharomyces cerevisiae
caactttcccttctgtttcaatctttttacctattcctttttaaaagatatatatacattaaactccttctacaagtatatattttatacatatctacagggcgtatatatacataacattttaagataagcaagtgaatgttgattcccgtttcttagtcaacacttctttctattttacccggtcgttaccctattaaaaaaacaacttacaatcattgttcgccccttccatacttactgccactcgcaaaagggcccaaccagggcaattacgtatcaaaaaatcatgacaggctgggtaataaatattcgtgaagaaagaagaaattaaaaaaagaaacgaagaagcaaaaaaaagaaaagactccgtttaatcactttcaaccgcggtttatccggccccacccatgcataaccctaaattattagatcacttagcacgtgaaaaagaaacgtttttaatgttttttttttttttttctttttctttttttgcgttggtgaaaattttttcgcttcctcgagtataattatctcatctcatctttcatataagataagaagttttataaaaaccttttgcatcaaaattttgtagaatatctctttttcttacgctctctttctttccttaattgttttctaaagaaccgtgtatttttctagttcgaatccatcgataacattaaaag

SEQ ID NO: 1621 - DNA, 679 bp, Saccharomyces cerevisiae
aactatcgcatacctgcatttaaagatgccgatttgggcgcgaatcctttattttggcttcaccctcatactattatcagggccagaaaaaggaagtgtttccctccttcttgaattgatgttaccctcataaagcacgtggcctcttatcgagaaagaaattaccgtcgctcgtgatttgtttgcaaaaagaacaaaactgaaaaaacccagacacgctcgacttcctgtcttcctattgattgcagcttccaatttcgtcacacaacaaggtcctagcgacggctcacaggttttgtaacaagcaatcgaaggttctggaatggcgggaaagggtttagtaccacatgctatgatgcccactgtgatctccagagcaaagttcgttcgatcgtactgttactctctctctttcaaacagaattgtccgaatcgtgtgacaacaacagcctgttctcacacactcttttcttctaaccaagggggtggtttagtttagtagaacctcgtgaaacttacatttacatatatataaacttgcataaattggtcaatgcaagaaatacatatttggtcttttctaattcgtagtttttcaagttcttagatgctttctttttctcttttttacagatcatcaaggaagtaattatctactttttacaacaaatataaaaca

SEQ ID NO: 1622 - DNA, 783 bp, Saccharomyces cerevisiae
tagcgtcaacaacaagaagtttaatgacgcggaggccaaggcaaaaagattccttgattacgtaagggagttagaatcattttgaataaaaaacacgctttttcagttcgagtttatcattatcaatactgccatttcaaagaatacgtaaataattaatagtagtgattttcctaactttatttagtcaaaaaattagccttttaattctgctgtaacccgtacatgcccaaaatagggggcgggttacacagaatatataacatcgtaggtgtctgggtgaacagtttattcctggcatccactaaatataatggagcccgctttttaagctggcatccagaaaaaaaaagaatcccagcaccaaaatattgttttcttcaccaaccatcagttcataggtccattctcttagcgcaactacagagaacaggggcacaaacaggcaaaaaacgggcacaacctcaatggagtgatgcaacctgcctggagtaaatgatgacacaaggcaattgacccacgcatgtatctatctcattttcttacaccttctattaccttctgctctctctgatttggaaaaagctgaaaaaaaaggttgaaaccagttccctgaaattattcccctacttgactaataagtatataaagacggtaggtattgattgtaattctgtaaatctatttcttaaacttcttaaattctacttttatagttagtcttttttttagttttaaaacaccaagaacttagtttcgaataaacacacataaacaaacaaa

SEQ ID NO: 1623 - DNA, 700 bp, Saccharomyces cerevisiae
cacccatgaaccacacggttagtccaaaaggggcagttcagattccagatgcgggaattagcttgctgccaccctcacctcactaacgctgcggtgtgcggatacttcatgctatttatagacgcgcgtgtcggaatcagcacgcgcaagaaccaaatgggaaaatcggaatgggtccagaactgctttgagtgctggctattggcgtctgatttccgttttgggaatcctttgccgcgcgcccctctcaaaactccgcacaagtcccagaaagcgggaaagaaataaaacgccaccaaaaaaaaaaaaataaaagccaatcctcgaagcgtgggtggtaggccctggattatcccgtacaagtatttctcaggagtaaaaaaaccgtttgttttggaatttcccatttcgcggccacctacgccgctatctttgcaacaactatctgcgataactcagcaaattttgcatattcgtgttgcagtattgcgataatgggagtcttacttccaacataacggcagaaagaaatgtgagaaaattttgcatcctttgcctccgttcaagtatataaagtcggcatgcttgataatctttctttccatcctacattgttctaattattcttattctcctttattctttcctaacataccaagaaattaatcttctgtcattcgcttaaacactatatcaataa

SEQ ID NO: 1624 - DNA, 501 bp, Saccharomyces cerevisiae
gaagcaacaggcgcgttggacttttaattttcgaggaccgcgaatccttacatcacacccaatcccccacaagtgatcccccacacaccatagcttcaaaatgtttctactccttttttactcttccagattttctcggactccgcgcatcgccgtaccacttcaaaacacccaagcacagcatactaaatttcccctctttcttcctctagggtgtcgttaattacccgtactaaaggtttggaaaagaaaaaagagaccgcctcgtttctttttcttcgtcgaaaaaggcaataaaaatttttatcacgtttctttttcttgaaaatttttttttttgatttttttctctttcgatgacctcccattgatatttaagttaataaacggtcttcaatttctcaagtttcagtttcatttttcttgttctattacaactttttttacttcttgctcattagaaagaaagcatagcaatctaatctaagttttaattacaaa

SEQ ID NO: 1625 - DNA, 700 bp, Saccharomyces cerevisiae
ggatatcgtaaacaaaggcgttaccatagaaatgtactgattggcagaattactcttcaggagaatctttcatacaaaggtattccattggggaaaatctcgttaccaagtcaatgctgaactttctatggcctttgtttactatcgttaattattttacgaccacttctgggtagaaatatttcgtagccctggaacgagcttgtttacgcgttttatcccattatatggcacccaaatcaaatttaaaaagaaaaaacgcgtaaacagtgtcgggtaagttcatcctctgttactttaattgcttctttttttgaaattctaagtaaacgcgtcattttgatcctcaggacacagaaatccttgcagaatcttattgggtgttgaatagaggacgcgtaaaaacgatatggaaatttttttcatatagtgtagaaagaataggttggcgtaggtagtttcgtgtttgatagaaacctccaacaaagtctgcaactcacgttttagaataacaagtttagagtttatcttgttgcctttgttaagtcagtaccattgaataaaaattatataaaggagctaatatttcattgttggaaaattactctaccataattgaagcatatctcatccttttcatccttttcaacgcaagagagacaccaacgaacaacactttatttgttgatatattaacatc

SEQ ID NO: 1626 - DNA, 700 bp, Saccharomyces cerevisiae
tttgagaatgaccttccacgagctaaattgaaagggaagaatttattagttgaactcaagaaagaagaggatgacgtgggaaatggcatagaatcccttactaaatcgaacactaaactgaactccatgctggcgaacgaaggtaagatacacaaagctagtttccagaaaagtgtaaaatttaaactacctgataatatagtgactgaagaaaccgtggaacttaaagaaataaaggacttgctactacaaatgttgagatgacagcgagagattgaatcaagattatccaatatcgaacttcaactcacggaaataccgaaacataagtaatcatatcccttctcacattttttacacaggaagtaagcaagttatgttatatttccgacactataattaattcttagcagttaaaggtgctttgtctatattacatttacatacagcttgagtgatcctgaccggatatagggtcctattttcttacgtgaacggcttttcttcttgttcccgatggccttcatgtgaaaaagcactcctcgggaggcggaaaaatatcaaaagtacggggcgaagtttataatgaagatttatcgatataaattttggttatttcaggagaacaagaaagctctttacactaaaattatcagagaagaagctgatatattagccctaaggagtacaccaaaacaca

SEQ ID NO: 1627 - DNA, 514 bp, Saccharomyces cerevisiae
gtttacgcgacaactatgcgaaatccggagcaacgggcaaccgtttggggaaagaccacacccacgcgcgatcgccatggcaacgaggtcgcacacgccccacacccagacctccctgcgagcgggcatgggtacaatgtccccgttgccacagagaccacttcgtagcacagcgcagagcgtagcgtgttgttgctgctgacaaaagaaaatttttcttagcaaagcaaaggaggggaagcacgggcagatagcaccgtaccatacccttggaaactcgaaatgaacgaagcaggaaatgagagaatgagagttttgtaggtatatatagcggtagtgtttgcgcgttaccatcatcttctggatctatctattgttcttttcctcatcactttcccctttttcgctcttcttcttgtcttttatttctttcttttttttaattgttccctcgattggctatctaccaaagaatccaaacttaatacacgtatttatttgtccaattaccatg

SEQ ID NO: 1628 - DNA, 700 bp, Saccharomyces cerevisiae
ttcgtgctttgtgataaagtgtttcacgtcatccgacatgacttcgtagttatggactgaactgtgtggtgaggttccatgatttcttaggtccagcagatacatgtctcttcccaatttcttgttaaggttacggccaatgcttcggttgttgagcttgttaccgaataagccgtgaagtatgataataggtggtcttggcttcccttcatccccagtttttactgcatctctcttgattatgtcatatgaaaggtccagtgggacttgcttttgttgcagcacctttgctaatgaatgaaaggcacatagtgactgcttaaaaatgcaggaacttaaattattccgaatggtattttgtctcacatatattgtcccatactgtgccaagatcccggctttacccagtatcatcattgtaccgttaccaattctcctcgtatatcacggttagtttttaaacctcggggtgacgtttactattggcgtactaatatattcttattttcttttcttttttgttggcagtttcaagcaacacatgtactggataaccaacccccgcacgctcttggaaaaaattgagaaggcatcggacacttgctgatgagtatttcgaaaaattccatgaagatgaggccaagattgtttggaagagattgaaaagaagaagaagaaaaaaagataaaagcaaatcaaa

SEQ ID NO: 1629 - DNA, 694 bp, Saccharomyces cerevisiae
ccttgtgaaattgcaaatatggtgatttgaaacgtttcctagtgcagcaggatcacagataacgtgtaaagggcttagcagttgataatcctctctagttaagacctaaacaaaatgctgtcactaaccgtagtattaaatgacacactttggtgactttcgttaatggggatgtggtagtggccattgccaataaacaaaaagaacagggaaagaagtagaaagtgatataagtttgcttgccacttttcgtttttcacgaaaaaaacaggcgaaaaaaaatgctagacaagtacccggctgaatcacacctcgttaacagtgactttcggtgacagatacccgattgggcacccggctggtaagttatgatagaaagccaacgctgtactattggcttagctatggcaatattttgattatcagctagttttattaacgttataattagtgtaaccagtttttcatctatttcatttatttcatttatttactttaattgcagatccccctaacgcgtttaaagcttttattcactagcttatgtattttttataggaaacgcgacgcgtaacatcgcgcaaatgaaggttttgatgtattataatgaggtattcttccttatatacatcgatgaaaagcgttgacagcatacattggaaagaaataggaaacggacaccggaagaaaaaat

SEQ ID NO: 1630 - DNA, 700 bp, Saccharomyces cerevisiae
tgacccaacatcagatgacccaaggtccacctcttattaaaggacgtttgatccttcgacaccatggctctgttgaacttttatctgagagaggaaaaaaaggaaggaaaaaaaagaagaaacttcctttatttatttgtcttaaccacaacacacaatgcaataagatgcaatataatatcaaagccaatatcttatgttgctgatcctgagaaggaatatatacaatttatgtagtaaaataccttttcttctgcgagttgcaagaaatagaaaagactccgattgcgcatcgccagaataaaatttcacaaccacactttttggctgaactttttattacctgattaaacagagagagaaaaggtagaggtcaaaattttttaagcaaaactaaaaaagatgcaaaatcacgtgctgaaaatctaacataagggttaagattagagttttataggacttgttttgtaatatttcaaatacgagctaaccctactgatttcaattaggtctaatttagggttgagctgcactgaaatttcggaaattttgggttattttaaatgagacagaagaactacagagatacgttcttcagactttaaagcttatctccacaaagaattggtcaagaaatcatcctagaaaaacacgtttgctcactcgatcttaatcacatagagtgctggaacgggaagaa

SEQ ID NO: 1631 - DNA, 288 bp, Saccharomyces cerevisiae
agcgttggttggtggatcaagcccacgcgtaggcaatcctcgagcagatccgccaggcgtgtatatatagcgtggatggccaggcaactttagtgctgacacatacaggcatatatatatgtgtgcgacgacacatgatcatatggcatgcatgtgctctgtatgtatataaaactcttgttttcttcttttctctaaatattctttccttatacattaggacctttgcagcataaattactatacttctatagacacacaaacacaaatacacacactaaattaata

SEQ ID NO: 1632 - DNA, 1000 bp, Saccharomyces cerevisiae
ttattgaaatcttacagaattttatagcaatcacatttgctattttccaacgttgtgaagtaatattatatgacgaattttacaaaaatctttcaaatgaggagattaatgttcaattgctattgattcatgacaagattttggaaattttaaaaaaaatagaaattatcgtatcctttttacgagatgaaatgaatagcaacggaagtttcaaatctattaaaggtttcaacaaggttttgaatctgattaaatatatgctgagatttagcaagaaaaaacaaaattttgcgagaaactctgataacaataatgttacagattatagtcagtcggcgaagaacaaaaatgttctcttgaaattccccgttagtgaactgaacagaatctatttaaaatttaaggagatttcagattttttaatggaaagagaagttgtccaaaggagtataattattgacaaggatttggaatctgataatctgggtattactacggcaaacttcaacgatttctatgatgcattttataattagtaagccgatcccattaccgacatttgggcgctatacgtgcatatgttcatgtatgtatctgtatttaaaacacttttgtattatttttcctcatatatgtgtataggtttatacggatgatttaattattacttcaccaccctttatttcaggctgatatcttagccttgttactagttagaaaaagacatttttgctgtcagtcactgtcaagagattcttttgctggcatttcttctagaagcaaaaagagcgatgcgtcttttccgctgaaccgttccagcaaaaaagactaccaacgcaatatggattgtcagaatcatataaaagagaagcaaataactccttgtcttgtatcaattgcattataatatcttcttgttagtgcaatatcatatagaagtcatcgaaatagatattaagaaaaacaaactgtacaatcaatcaatcaatcatcacataaa

SEQ ID NO: 1633 - DNA, 393 bp, Saccharomyces cerevisiae
tctagagtatggatgggggtaatagaattgtatctatgtatctgacgaccctgtattacacgaaggaaatagtagatgaaaagacaagagagcaagaaaaaggaaaaacttcctttctaacagacgctttacttaaccttatatatatcttatttttttcatcgagcgtgttcaattggacaaggtgccaccttttcgacacttcggttattatgttacacagttttcatgaggatggcgccttgactaacttaattagtcatttgccaaccaccacagttccccaatatcgacagcttcacgtgccatttgccattttgcgatcatgtgacctcaagagaaaaagcaaaaaataatgagagctaagggattcgaacccttgcatccggagct

SEQ ID NO: 1634 - DNA, 400 bp, Saccharomyces cerevisiae
gcgaatttcttatgatttatgatttttattattaaataagttataaaaaaaataagtgtatacaaattttaaagtgactcttaggttttaaaacgaaaattcttattcttgagtaactctttcctgtaggtcaggttgctttctcaggtatagcatgaggtcgctcttattgaccacacctctaccggcatgccgagcaaatgcctgcaaatcgctccccatttcacccaattgtagatatgctaactccagcaatgagttgatgaatctcggtgtgtattttatgtcctcagaggacaacacctgttgtaatcgttcttccacacggatccacagcctagccttcagttgggctctatcttcatcgtcattcattgcatctactagccccttacctgag

SEQ ID NO: 1635 - DNA, 350 bp, Saccharomyces cerevisiae
acaggccccttttcctttgtcgatatcatgtaattagttatgtcacgcttacattcacgccctcctcccacatccgctctaaccgaaaaggaaggagttagacaacctgaagtctaggtccctatttattttttttaatagttatgttagtattaagaacgttatttatatttcaaatttttcttttttttctgtacaaacgcgtgtacgcatgtaacattatactgaaaaccttgcttgagaaggttttgggacgctcgaaggctttaatttgcaagcttcgcagtttacactctcatcgtcgctctcatcatcgcttccgttgttgttttccttagtagcgtctgctt

SEQ ID NO: 1636 - DNA, 225 bp, Saccharomyces cerevisiae
attgaattgaattgaaatcgatagatcaatttttttcttttctctttccccatcctttacgctaaaataatagtttattttattttttgaatattttttatttatatacgtatatatagactattatttatcttttaatgattattaagatttttattaaaaaaaaattcgctcctcttttaatgcctttatgcagtttttttttcccattcgatatttctatgt

SEQ ID NO: 1637 - DNA, 446 bp, Saccharomyces cerevisiae
ttttgtataactaaataatattggaaactaaatacgaatacccaaattttttatctaaattttgccgaaagattaaaatctgcagagatatccgaaacaggtaaatggatgtttcaatccctgtagtcagtcaggaacccatattatattacagtattagtcgccgcttaggcacgcctttaattagcaaaatcaaaccttaagtgcatatgccgtataagggaaactcaaagaactggcatcgcaaaaatgaaaaaaaggaagagtgaaaaaaaaaaaattcaaaagaaatttactaaataataccagtttgggaaatagtaaacagctttgagtagtcctatgcaacatatataagtgcttaaatttgctggatggaagtcaattatgccttgattatcataaaaaaaatactacagtaaagaaagggccattccaaattacct

SEQ ID NO: 1638 - DNA, 350 bp, Saccharomyces cerevisiae
gagagtagactttttctgtgaaatttaatgagtttttgttcaccttttttacttttcttctatgccatatggttaaataaaacatggttcaaacgcgattcttttttattatctatgtctttattatgtagtcttcactataataaccgttaatgagcgacatagttgcatcagtttttaaggccaatttgattcagaaccttttcaagttcttcactttccatcttatccgaagacgcgatctggtggcatctaatactatgcttctcgaatatcgtttcatcaatttcaatttcaccattttttaggtaaacaatatcagtaataaaatcttgccattcaaagtcatc

SEQ ID NO: 1639 - DNA, 224 bp, Saccharomyces cerevisiae
cgttcagggtaatatattttaaccgccgacgttctcgccataacttttaaacagtgataactaatattgaaacttagaaagaaaagggtaaagttaatgcttaatcttgtcttggcttaaaaagtaatatgtacttatttacgtcatcacaaaatctagcagaaaaacggtagtatttatgtatattcaaaaaaaaatcattatcctcatcaagattgctttat

SEQ ID NO: 1640 - DNA, 350 bp, Saccharomyces cerevisiae
aagggaaccttttacaacaaatatttgaaaaattacctccattattataccttctctttatgtaattgttagttcgaaaattttttcttcattaatataatcaacttctaaaactttctaaaaacgttctctttttcgagattagtgcttcttcccaatccgtaagaaatgtttcctttcttgacaattggcaccagctggctactcgttgctcgaaaactactctcttttatttttaatttacgaacgattatctttcgaaggaacgaccaaacgagctaaatatgggcatcgccaacgttaaaaaaatggaccctaccgaagacgttattatgccaaggcgcagcgaa

SEQ ID NO: 1641 - DNA, 351 bp, Saccharomyces cerevisiae
tgaacccgatgcaaatgagacgatcgtctattcctggtccggttttctctgccctctcttctattcactttttttatactttatataaaattatataaatgacataactgaaacgccacacgtcctctcctattcgttaacgcctgtctgtagcgctgttactgaagctgcgcaagtagttttttcaccgtataggccctctttttctctctctttctttctctcccgcgctgatctcttcttcgaaacatcatgaataaaaagaaaaaggaaatcaagaaaaaaaagccataatttatcccacatttttttttattgtcgctgttcacaccgcataacgaagatattggc

SEQ ID NO: 1642 - protein, 359 aa, Nepeta cataria; identical to SEQ ID NO: 561

SEQ ID NO: 1643 - protein, 355 aa, Nepeta cataria; identical to SEQ ID NO: 566

SEQ ID NO: 1644 - protein, 435 aa, Nepeta cataria; identical to SEQ ID NO: 578

SEQ ID NO: 1645 - protein, 889 aa, Artificial Sequence
  GPPS-GES engineered fusion
MGCIRSTTHTSTNYGINSRLGLSFPVPIIYRPAGASRNISIYMSSSAAPNVTQVVVGANDALLQYTHQPMLIPSEVDADTERRDYLLEKARQELSRTTKPTDKLKLIDMIQRLGIGFYLEDDINAILRTQFSVNVIDEEDLSATGLRFRMLRQNSFPISSDIFKRFQDQNEKFDETLTNDTLGVIELVRSIIHGEPKGEEILEEAMEFSKTRLKRSLSSLPAQIKADVGQALELPTHLRMARLEARRFIEQYATQSDHNPILLELATLDYNHVQSQHQMELVEITRWWKQLGLVDQLSFARDRPLECFLWTVGLLPEPKYSSCRIELAKTIAVLLVIDDIFDTYGKMDDLILFTDAIQRWDLGAMESLPEYMKICYMALYNLTNEICYKVLKENGWTVLPYLKSSWIDMIEGFMVEAKWFNGGCAPNLEEYVENGVSTAGSYMALVHLFFLIGEGVTEQNAQLLMKKPYPKAFSSAGRILRLWDDLGTAKEEQERGDLASSINLFMKERNLATEEEGRECILEDIYGYWKDLNGELVSQKEMPLAIIKVALNMARASQVVYKHEEDSYFSNVDNYVQALLFTPLIIGGGSMDFPQQLEACVKQANQALSRFIAPLPFQNTPVVETMQYGALLGGKRLRPFLVYATGHMFGVSTNTLDAPAAAVECIHAYFLIHDDLPAMDDDDLRRGLPTCHVKFGEANAILAGDALQTLAFSILSDADMPEVSDRDRISMISELASASGIAGMCGGQALDLDAEGKHVPLDALERIHRHKTGALIRAAVRLGALSAGDKGRRALPVLDKYAESIGLAFQVQDDILDVVGDTATLGKRQGADQQLGKSTYPALLGLEQARKKARDLIDDARQSLKQLAEQSLDTSALEALADYIIQRNK

SEQ ID NO: 1646 - protein, 942 aa, Artificial Sequence
  GPPS-GES engineered fusion
MGCIRSTTHTSTNYGINSRLGLSFPVPIIYRPAGASRNISIYMSSSAAPNVTQVVVGANDALLQYTHQPMLIPSEVDADTERRDYLLEKARQELSRTTKPTDKLKLIDMIQRLGIGFYLEDDINAILRTQFSVNVIDEEDLSATGLRFRMLRQNSFPISSDIFKRFQDQNEKFDETLTNDTLGVIELVRSIIHGEPKGEEILEEAMEFSKTRLKRSLSSLPAQIKADVGQALELPTHLRMARLEARRFIEQYATQSDHNPILLELATLDYNHVQSQHQMELVEITRWWKQLGLVDQLSFARDRPLECFLWTVGLLPEPKYSSCRIELAKTIAVLLVIDDIFDTYGKMDDLILFTDAIQRWDLGAMESLPEYMKICYMALYNLTNEICYKVLKENGWTVLPYLKSSWIDMIEGFMVEAKWFNGGCAPNLEEYVENGVSTAGSYMALVHLFFLIGEGVTEQNAQLLMKKPYPKAFSSAGRILRLWDDLGTAKEEQERGDLASSINLFMKERNLATEEEGRECILEDIYGYWKDLNGELVSQKEMPLAIIKVALNMARASQVVYKHEEDSYFSNVDNYVQALLFTPLIIGGGSMASEKEIRRERFLNVFPKLVEELNASLLAYGMPKEACDWYAHSLNYNTPGGKLNRGLSVVDTYAILSNKTVEQLGQEEYEKVAILGWCIELLQAYWLVADDMMDKSITRRGQPCWYKVPEVGEIAIWDAFMLEAAIYKLLKSHFRNEKYYIDITELFHEVTFQTELGQLMDLITAPEDKVDLSKFSLKKHSFIVTFKTAYYSFYLPVALAMYVAGITDEKDLKQARDVLIPLGEYFQIQDDYLDCFGTPEQIGKIGTDIQDNKCSWVINKALELASAEQRKTLDENYGKKDSVAEAKCKKIFNDLKIEQLYHEYEESIAKDLKAKISQVDESRGFKADVLTAFLNKVYKRSK

SEQ ID NO: 1647 - protein, 909 aa, Artificial Sequence
  GPPS-GES engineered fusion
MGCIRSTTHTSTNYGINSRLGLSFPVPIIYRPAGASRNISIYMSSSAAPNVTQVVVGANDALLQYTHQPMLIPSEVDADTERRDYLLEKARQELSRTTKPTDKLKLIDMIQRLGIGFYLEDDINAILRTQFSVNVIDEEDLSATGLRFRMLRQNSFPISSDIFKRFQDQNEKFDETLTNDTLGVIELVRSIIHGEPKGEEILEEAMEFSKTRLKRSLSSLPAQIKADVGQALELPTHLRMARLEARRFIEQYATQSDHNPILLELATLDYNHVQSQHQMELVEITRWWKQLGLVDQLSFARDRPLECFLWTVGLLPEPKYSSCRIELAKTIAVLLVIDDIFDTYGKMDDLILFTDAIQRWDLGAMESLPEYMKICYMALYNLTNEICYKVLKENGWTVLPYLKSSWIDMIEGFMVEAKWFNGGCAPNLEEYVENGVSTAGSYMALVHLFFLIGEGVTEQNAQLLMKKPYPKAFSSAGRILRLWDDLGTAKEEQERGDLASSINLFMKERNLATEEEGRECILEDIYGYWKDLNGELVSQKEMPLAIIKVALNMARASQVVYKHEEDSYFSNVDNYVQALLFTPLIIGGGSMLRCSNTNAQLANLSEQVKGKVTEFDFKEYMRSKAMSVNEALDRAVPLRYPEKIHEAMRYSLLAGGKRVRPILCIAACELVGGSEELAMPTACAMEIIHTMSLIHDDLPCIDNDDLRRGKPTNHKVFGEGTAVLAGDALLSFAFEHIAVSTSKTVESDRVLRVVSELGRAIGSEGVAGGQVADITSQGNPSVGLETLEWIHIHKTAVLLECSVASGAIIGGASDDEIERVRKYARCVGLLFQVVDDILDVTKSSEELGKTAAKDLLSDKATYPKLMGLEKAKEFADELLGKAKEELSFFNPTKAAPLLGLADYIAQRQN

SEQ ID NO: 1648 - protein, 961 aa, Artificial Sequence
  GPPS-GES engineered fusion
MGCIRSTTHTSTNYGINSRLGLSFPVPIIYRPAGASRNISIYMSSSAAPNVTQVVVGANDALLQYTHQPMLIPSEVDADTERRDYLLEKARQELSRTTKPTDKLKLIDMIQRLGIGFYLEDDINAILRTQFSVNVIDEEDLSATGLRFRMLRQNSFPISSDIFKRFQDQNEKFDETLTNDTLGVIELVRSIIHGEPKGEEILEEAMEFSKTRLKRSLSSLPAQIKADVGQALELPTHLRMARLEARRFIEQYATQSDHNPILLELATLDYNHVQSQHQMELVEITRWWKQLGLVDQLSFARDRPLECFLWTVGLLPEPKYSSCRIELAKTIAVLLVIDDIFDTYGKMDDLILFTDAIQRWDLGAMESLPEYMKICYMALYNLTNEICYKVLKENGWTVLPYLKSSWIDMIEGFMVEAKWFNGGCAPNLEEYVENGVSTAGSYMALVHLFFLIGEGVTEQNAQLLMKKPYPKAFSSAGRILRLWDDLGTAKEEQERGDLASSINLFMKERNLATEEEGRECILEDIYGYWKDLNGELVSQKEMPLAIIKVALNMARASQVVYKHEEDSYFSNVDNYVQALLFTPLIIGGGSMKDVSLSSFDAHDLDLDKFPEVVRDRLTQFLDAQELTIADIGAPVTDAVAHLRSFVLNGGKRIRPLYAWAGFLAAQGHKNSSEKLESVLDAAASLEFIQACALIHDDIIDSSDTRRGAPTVHRAVEADHRANNFEGDPEHFGVSVSILAGDMALVWAEDMLQDSGLSAEALARTRDAWRGMRTEVIGGQLLDIYLESHANESVELADSVNRFKTAAYTIARPLHLGASIAGGSPQLIDALLHYGHDIGIAFQLRDDLLGVFGDPAITGKPAGDDIREGKRTVLLALALQRADKQSPEAATAIRAGVGKVTSPEDIAVITEHIRATGAEEEVEQRISQLTESGLAHLDDVDIPDEVRAQLRALAIRSTERRM

SEQ ID NO: 1649 - protein, 937 aa, Artificial Sequence
  GPPS-GES engineered fusion
MGCIRSTTHTSTNYGINSRLGLSFPVPIIYRPAGASRNISIYMSSSAAPNVTQVVVGANDALLQYTHQPMLIPSEVDADTERRDYLLEKARQELSRTTKPTDKLKLIDMIQRLGIGFYLEDDINAILRTQFSVNVIDEEDLSATGLRFRMLRQNSFPISSDIFKRFQDQNEKFDETLTNDTLGVIELVRSIIHGEPKGEEILEEAMEFSKTRLKRSLSSLPAQIKADVGQALELPTHLRMARLEARRFIEQYATQSDHNPILLELATLDYNHVQSQHQMELVEITRWWKQLGLVDQLSFARDRPLECFLWTVGLLPEPKYSSCRIELAKTIAVLLVIDDIFDTYGKMDDLILFTDAIQRWDLGAMESLPEYMKICYMALYNLTNEICYKVLKENGWTVLPYLKSSWIDMIEGFMVEAKWFNGGCAPNLEEYVENGVSTAGSYMALVHLFFLIGEGVTEQNAQLLMKKPYPKAFSSAGRILRLWDDLGTAKEEQERGDLASSINLFMKERNLATEEEGRECILEDIYGYWKDLNGELVSQKEMPLAIIKVALNMARASQVVYKHEEDSYFSNVDNYVQALLFTPLIIGGGSMLAEEQLDPFSLVADELSLLADRLRSMVVAEVPKLASAAEYFFKMGVEGKRFRPTVLLLMATALNVPLPRPALAEVPETLSTELRTRQQCIAEITEMIHVASLLHDDVLDDAETRRGIGSLNIMMGNKVAVLAGDFLLSRACVALASLKNTEVVSLLATVVEHLVTGETMQMTSTSEQRVSMEYYLQKTYYKTASLISNSCKAIALLAGQTAEVSMLAFEYGKNLGLAFQLIDDVLDFTGTSASLGKGSLSDIRHGIITAPILFAIEEFPQLDAVVKRGLDNPADIDLALDYLGKSRGIQRTRELAMKHANLAAEAIDSLPESGDEDVLRSRRALIDLTHRVITRTK

SEQ ID NO: 1650 - protein, 442 aa, Artificial Sequence
  GPPS-GES engineered fusion
MQEAVAKVAQLIIIIDDIYDVYGTVDELELFTNAIDRWDLEAMEQLPEYMKTCFLALYNSINEIGYEILKEEGRNVIPYLRNTWTELCKAFLVEAKWYSSGYTPTLEEYLQTSWISIGSLPMQTYVFALLGKNLAPESSGGGSMDFPQQLEACVKQANQALSRFIAPLPFQNTPVVETMQYGALLGGKRLRPFLVYATGHMFGVSTNTLDAPAAAVECIHAYFLIHDDLPAMDDDDLRRGLPTCHVKFGEANAILAGDALQTLAFSILSDADMPEVSDRDRISMISELASASGIAGMCGGQALDLDAEGKHVPLDALERIHRHKTGALIRAAVRLGALSAGDKGRRALPVLDKYAESIGLAFQVQDDILDVVGDTATLGKRQGADQQLGKSTYPALLGLEQARKKARDLIDDARQSLKQLAEQSLDTSALEALADYIIQRNK

SEQ ID NO: 1651 - protein, 495 aa, Artificial Sequence
  GPPS-GES engineered fusion
MQEAVAKVAQLIIIIDDIYDVYGTVDELELFTNAIDRWDLEAMEQLPEYMKTCFLALYNSINEIGYEILKEEGRNVIPYLRNTWTELCKAFLVEAKWYSSGYTPTLEEYLQTSWISIGSLPMQTYVFALLGKNLAPESSGGGSMASEKEIRRERFLNVFPKLVEELNASLLAYGMPKEACDWYAHSLNYNTPGGKLNRGLSVVDTYAILSNKTVEQLGQEEYEKVAILGWCIELLQAYWLVADDMMDKSITRRGQPCWYKVPEVGEIAIWDAFMLEAAIYKLLKSHFRNEKYYIDITELFHEVTFQTELGQLMDLITAPEDKVDLSKFSLKKHSFIVTFKTAYYSFYLPVALAMYVAGITDEKDLKQARDVLIPLGEYFQIQDDYLDCFGTPEQIGKIGTDIQDNKCSWVINKALELASAEQRKTLDENYGKKDSVAEAKCKKIFNDLKIEQLYHEYEESIAKDLKAKISQVDESRGFKADVLTAFLNKVYKRSK

SEQ ID NO: 1652 - protein, 462 aa, Artificial Sequence
  GPPS-GES engineered fusion
MQEAVAKVAQLIIIIDDIYDVYGTVDELELFTNAIDRWDLEAMEQLPEYMKTCFLALYNSINEIGYEILKEEGRNVIPYLRNTWTELCKAFLVEAKWYSSGYTPTLEEYLQTSWISIGSLPMQTYVFALLGKNLAPESSGGGSMLRCSNTNAQLANLSEQVKGKVTEFDFKEYMRSKAMSVNEALDRAVPLRYPEKIHEAMRYSLLAGGKRVRPILCIAACELVGGSEELAMPTACAMEIIHTMSLIHDDLPCIDNDDLRRGKPTNHKVFGEGTAVLAGDALLSFAFEHIAVSTSKTVESDRVLRVVSELGRAIGSEGVAGGQVADITSQGNPSVGLETLEWIHIHKTAVLLECSVASGAIIGGASDDEIERVRKYARCVGLLFQVVDDILDVTKSSEELGKTAAKDLLSDKATYPKLMGLEKAKEFADELLGKAKEELSFFNPTKAAPLLGLADYIAQRQN

SEQ ID NO: 1653 - protein, 514 aa, Artificial Sequence
  GPPS-GES engineered fusion
MQEAVAKVAQLIIIIDDIYDVYGTVDELELFTNAIDRWDLEAMEQLPEYMKTCFLALYNSINEIGYEILKEEGRNVIPYLRNTWTELCKAFLVEAKWYSSGYTPTLEEYLQTSWISIGSLPMQTYVFALLGKNLAPESSGGGSMKDVSLSSFDAHDLDLDKFPEVVRDRLTQFLDAQELTIADIGAPVTDAVAHLRSFVLNGGKRIRPLYAWAGFLAAQGHKNSSEKLESVLDAAASLEFIQACALIHDDIIDSSDTRRGAPTVHRAVEADHRANNFEGDPEHFGVSVSILAGDMALVWAEDMLQDSGLSAEALARTRDAWRGMRTEVIGGQLLDIYLESHANESVELADSVNRFKTAAYTIARPLHLGASIAGGSPQLIDALLHYGHDIGIAFQLRDDLLGVFGDPAITGKPAGDDIREGKRTVLLALALQRADKQSPEAATAIRAGVGKVTSPEDIAVITEHIRATGAEEEVEQRISQLTESGLAHLDDVDIPDEVRAQLRALAIRSTERRM

SEQ ID NO: 1654 - protein, 490 aa, Artificial Sequence
  GPPS-GES engineered fusion
MQEAVAKVAQLIIIIDDIYDVYGTVDELELFTNAIDRWDLEAMEQLPEYMKTCFLALYNSINEIGYEILKEEGRNVIPYLRNTWTELCKAFLVEAKWYSSGYTPTLEEYLQTSWISIGSLPMQTYVFALLGKNLAPESSGGGSMLAEEQLDPFSLVADELSLLADRLRSMVVAEVPKLASAAEYFFKMGVEGKRFRPTVLLLMATALNVPLPRPALAEVPETLSTELRTRQQCIAEITEMIHVASLLHDDVLDDAETRRGIGSLNIMMGNKVAVLAGDFLLSRACVALASLKNTEVVSLLATVVEHLVTGETMQMTSTSEQRVSMEYYLQKTYYKTASLISNSCKAIALLAGQTAEVSMLAFEYGKNLGLAFQLIDDVLDFTGTSASLGKGSLSDIRHGIITAPILFAIEEFPQLDAVVKRGLDNPADIDLALDYLGKSRGIQRTRELAMKHANLAAEAIDSLPESGDEDVLRSRRALIDLTHRVITRTK

SEQ ID NO: 1655 - protein, 906 aa, Artificial Sequence
  GPPS-GES engineered fusion
MSSISQKVVIGLNKAAANNNLQNLDRRGFKTRCVSSSKAASCLRASCSLQLDVKPVQEGRRSGNYQPSIWDFNYVQSLNTPYKEERYLTRHAELIVQVKPLLEKKMEPAQQLELIDDLNNLGLSYFFQDRIKQILSFIYDENQCFHSNINDQAEKRDLYFTALGFRLLRQHGFDVSQEVFDCFKNDNGSDFKASLSDNTKGLLQLYEASFLVREGEDTLEQARQFATKFLRRKLDEIDDNHLLSCIHHSLEIPLHWRIQRLEARWFLDAYATRHDMNPVILELAKLDFNIIQATHQEELKDVSRWWQNTRLAEKLPFVRDRLVESYFWAIALFEPHQYGYQRRVAAKIITLATSIDDVYDIYGTLDELQLFTDNFRRWDTESLGRLPYSMQLFYMVIHNFVSELAYEILKEKGFIVIPYLQRSWVDLAESFLKEANWYYSGYTPSLEEYIDNGSISIGAVAVLSQVYFTLANSIEKPKIESMYKYHHILRLSGLLVRLHDDLGTSLFEKKRGDVPKAVEICMKERNVTEEEAEEHVKYLIREAWKEMNTATTAAGCPFMDELNVAAANLGRAAQFVYLDGDGHGVQHSKIHQQMGGLMFEPYVGGGSMDFPQQLEACVKQANQALSRFIAPLPFQNTPVVETMQYGALLGGKRLRPFLVYATGHMFGVSTNTLDAPAAAVECIHAYFLIHDDLPAMDDDDLRRGLPTCHVKFGEANAILAGDALQTLAFSILSDADMPEVSDRDRISMISELASASGIAGMCGGQALDLDAEGKHVPLDALERIHRHKTGALIRAAVRLGALSAGDKGRRALPVLDKYAESIGLAFQVQDDILDVVGDTATLGKRQGADQQLGKSTYPALLGLEQARKKARDLIDDARQSLKQLAEQSLDTSALEALADYIIQRNK

SEQ ID NO: 1656 - protein, 959 aa, Artificial Sequence
  GPPS-GES engineered fusion
MSSISQKVVIGLNKAAANNNLQNLDRRGFKTRCVSSSKAASCLRASCSLQLDVKPVQEGRRSGNYQPSIWDFNYVQSLNTPYKEERYLTRHAELIVQVKPLLEKKMEPAQQLELIDDLNNLGLSYFFQDRIKQILSFIYDENQCFHSNINDQAEKRDLYFTALGFRLLRQHGFDVSQEVFDCFKNDNGSDFKASLSDNTKGLLQLYEASFLVREGEDTLEQARQFATKFLRRKLDEIDDNHLLSCIHHSLEIPLHWRIQRLEARWFLDAYATRHDMNPVILELAKLDFNIIQATHQEELKDVSRWWQNTRLAEKLPFVRDRLVESYFWAIALFEPHQYGYQRRVAAKIITLATSIDDVYDIYGTLDELQLFTDNFRRWDTESLGRLPYSMQLFYMVIHNFVSELAYEILKEKGFIVIPYLQRSWVDLAESFLKEANWYYSGYTPSLEEYIDNGSISIGAVAVLSQVYFTLANSIEKPKIESMYKYHHILRLSGLLVRLHDDLGTSLFEKKRGDVPKAVEICMKERNVTEEEAEEHVKYLIREAWKEMNTATTAAGCPFMDELNVAAANLGRAAQFVYLDGDGHGVQHSKIHQQMGGLMFEPYVGGGSMASEKEIRRERFLNVFPKLVEELNASLLAYGMPKEACDWYAHSLNYNTPGGKLNRGLSVVDTYAILSNKTVEQLGQEEYEKVAILGWCIELLQAYWLVADDMMDKSITRRGQPCWYKVPEVGEIAIWDAFMLEAAIYKLLKSHFRNEKYYIDITELFHEVTFQTELGQLMDLITAPEDKVDLSKFSLKKHSFIVTFKTAYYSFYLPVALAMYVAGITDEKDLKQARDVLIPLGEYFQIQDDYLDCFGTPEQIGKIGTDIQDNKCSWVINKALELASAEQRKTLDENYGKKDSVAEAKCKKIFNDLKIEQLYHEYEESIAKDLKAKISQVDESRGFKADVLTAFLNKVYKRSK

SEQ ID NO: 1657 - protein, 926 aa, Artificial Sequence
  GPPS-GES engineered fusion
MSSISQKVVIGLNKAAANNNLQNLDRRGFKTRCVSSSKAASCLRASCSLQLDVKPVQEGRRSGNYQPSIWDFNYVQSLNTPYKEERYLTRHAELIVQVKPLLEKKMEPAQQLELIDDLNNLGLSYFFQDRIKQILSFIYDENQCFHSNINDQAEKRDLYFTALGFRLLRQHGFDVSQEVFDCFKNDNGSDFKASLSDNTKGLLQLYEASFLVREGEDTLEQARQFATKFLRRKLDEIDDNHLLSCIHHSLEIPLHWRIQRLEARWFLDAYATRHDMNPVILELAKLDFNIIQATHQEELKDVSRWWQNTRLAEKLPFVRDRLVESYFWAIALFEPHQYGYQRRVAAKIITLATSIDDVYDIYGTLDELQLFTDNFRRWDTESLGRLPYSMQLFYMVIHNFVSELAYEILKEKGFIVIPYLQRSWVDLAESFLKEANWYYSGYTPSLEEYIDNGSISIGAVAVLSQVYFTLANSIEKPKIESMYKYHHILRLSGLLVRLHDDLGTSLFEKKRGDVPKAVEICMKERNVTEEEAEEHVKYLIREAWKEMNTATTAAGCPFMDELNVAAANLGRAAQFVYLDGDGHGVQHSKIHQQMGGLMFEPYVGGGSMLRCSNTNAQLANLSEQVKGKVTEFDFKEYMRSKAMSVNEALDRAVPLRYPEKIHEAMRYSLLAGGKRVRPILCIAACELVGGSEELAMPTACAMEIIHTMSLIHDDLPCIDNDDLRRGKPTNHKVFGEGTAVLAGDALLSFAFEHIAVSTSKTVESDRVLRVVSELGRAIGSEGVAGGQVADITSQGNPSVGLETLEWIHIHKTAVLLECSVASGAIIGGASDDEIERVRKYARCVGLLFQVVDDILDVTKSSEELGKTAAKDLLSDKATYPKLMGLEKAKEFADELLGKAKEELSFFNPTKAAPLLGLADYIAQRQN

SEQ ID NO: 1658 - protein, 978 aa, Artificial Sequence
  GPPS-GES engineered fusion
MSSISQKVVIGLNKAAANNNLQNLDRRGFKTRCVSSSKAASCLRASCSLQLDVKPVQEGRRSGNYQPSIWDFNYVQSLNTPYKEERYLTRHAELIVQVKPLLEKKMEPAQQLELIDDLNNLGLSYFFQDRIKQILSFIYDENQCFHSNINDQAEKRDLYFTALGFRLLRQHGFDVSQEVFDCFKNDNGSDFKASLSDNTKGLLQLYEASFLVREGEDTLEQARQFATKFLRRKLDEIDDNHLLSCIHHSLEIPLHWRIQRLEARWFLDAYATRHDMNPVILELAKLDFNIIQATHQEELKDVSRWWQNTRLAEKLPFVRDRLVESYFWAIALFEPHQYGYQRRVAAKIITLATSIDDVYDIYGTLDELQLFTDNFRRWDTESLGRLPYSMQLFYMVIHNFVSELAYEILKEKGFIVIPYLQRSWVDLAESFLKEANWYYSGYTPSLEEYIDNGSISIGAVAVLSQVYFTLANSIEKPKIESMYKYHHILRLSGLLVRLHDDLGTSLFEKKRGDVPKAVEICMKERNVTEEEAEEHVKYLIREAWKEMNTATTAAGCPFMDELNVAAANLGRAAQFVYLDGDGHGVQHSKIHQQMGGLMFEPYVGGGSMKDVSLSSFDAHDLDLDKFPEVVRDRLTQFLDAQELTIADIGAPVTDAVAHLRSFVLNGGKRIRPLYAWAGFLAAQGHKNSSEKLESVLDAAASLEFIQACALIHDDIIDSSDTRRGAPTVHRAVEADHRANNFEGDPEHFGVSVSILAGDMALVWAEDMLQDSGLSAEALARTRDAWRGMRTEVIGGQLLDIYLESHANESVELADSVNRFKTAAYTIARPLHLGASIAGGSPQLIDALLHYGHDIGIAFQLRDDLLGVFGDPAITGKPAGDDIREGKRTVLLALALQRADKQSPEAATAIRAGVGKVTSPEDIAVITEHIRATGAEEEVEQRISQLTESGLAHLDDVDIPDEVRAQLRALAIRSTERRM

SEQ ID NO: 1659 - protein, 954 aa, Artificial Sequence
  GPPS-GES engineered fusion
MSSISQKVVIGLNKAAANNNLQNLDRRGFKTRCVSSSKAASCLRASCSLQLDVKPVQEGRRSGNYQPSIWDFNYVQSLNTPYKEERYLTRHAELIVQVKPLLEKKMEPAQQLELIDDLNNLGLSYFFQDRIKQILSFIYDENQCFHSNINDQAEKRDLYFTALGFRLLRQHGFDVSQEVFDCFKNDNGSDFKASLSDNTKGLLQLYEASFLVREGEDTLEQARQFATKFLRRKLDEIDDNHLLSCIHHSLEIPLHWRIQRLEARWFLDAYATRHDMNPVILELAKLDFNIIQATHQEELKDVSRWWQNTRLAEKLPFVRDRLVESYFWAIALFEPHQYGYQRRVAAKIITLATSIDDVYDIYGTLDELQLFTDNFRRWDTESLGRLPYSMQLFYMVIHNFVSELAYEILKEKGFIVIPYLQRSWVDLAESFLKEANWYYSGYTPSLEEYIDNGSISIGAVAVLSQVYFTLANSIEKPKIESMYKYHHILRLSGLLVRLHDDLGTSLFEKKRGDVPKAVEICMKERNVTEEEAEEHVKYLIREAWKEMNTATTAAGCPFMDELNVAAANLGRAAQFVYLDGDGHGVQHSKIHQQMGGLMFEPYVGGGSMLAEEQLDPFSLVADELSLLADRLRSMVVAEVPKLASAAEYFFKMGVEGKRFRPTVLLLMATALNVPLPRPALAEVPETLSTELRTRQQCIAEITEMIHVASLLHDDVLDDAETRRGIGSLNIMMGNKVAVLAGDFLLSRACVALASLKNTEVVSLLATVVEHLVTGETMQMTSTSEQRVSMEYYLQKTYYKTASLISNSCKAIALLAGQTAEVSMLAFEYGKNLGLAFQLIDDVLDFTGTSASLGKGSLSDIRHGIITAPILFAIEEFPQLDAVVKRGLDNPADIDLALDYLGKSRGIQRTRELAMKHANLAAEAIDSLPESGDEDVLRSRRALIDLTHRVITRTK

SEQ ID NO: 1660 - protein, 489 aa, Artificial Sequence
  GPPS-GES engineered fusion
MEEAKWFNRGYIPTLDEYLANGVISGGTCMALVHAFFLMGKGVMKETEAMMEPYPRCFTSSGKILRLWDDLGTSREEQERGDVASSIECLMNEKNIALEDGARKHVRQLIGSLWIELNGELVAPTGLPLSTIKASFNLSRTAQAIYQHGNDNTASSVQDHVQSLFFNPIGFQTRSPNHRNVTLSNRGGGSMDFPQQLEACVKQANQALSRFIAPLPFQNTPVVETMQYGALLGGKRLRPFLVYATGHMFGVSTNTLDAPAAAVECIHAYFLIHDDLPAMDDDDLRRGLPTCHVKFGEANAILAGDALQTLAFSILSDADMPEVSDRDRISMISELASASGIAGMCGGQALDLDAEGKHVPLDALERIHRHKTGALIRAAVRLGALSAGDKGRRALPVLDKYAESIGLAFQVQDDILDVVGDTATLGKRQGADQQLGKSTYPALLGLEQARKKARDLIDDARQSLKQLAEQSLDTSALEALADYIIQRNK

SEQ ID NO: 1661 - protein, 542 aa, Artificial Sequence
  GPPS-GES engineered fusion
MEEAKWFNRGYIPTLDEYLANGVISGGTCMALVHAFFLMGKGVMKETEAMMEPYPRCFTSSGKILRLWDDLGTSREEQERGDVASSIECLMNEKNIALEDGARKHVRQLIGSLWIELNGELVAPTGLPLSTIKASFNLSRTAQAIYQHGNDNTASSVQDHVQSLFFNPIGFQTRSPNHRNVTLSNRGGGSMASEKEIRRERFLNVFPKLVEELNASLLAYGMPKEACDWYAHSLNYNTPGGKLNRGLSVVDTYAILSNKTVEQLGQEEYEKVAILGWCIELLQAYWLVADDMMDKSITRRGQPCWYKVPEVGEIAIWDAFMLEAAIYKLLKSHFRNEKYYIDITELFHEVTFQTELGQLMDLITAPEDKVDLSKFSLKKHSFIVTFKTAYYSFYLPVALAMYVAGITDEKDLKQARDVLIPLGEYFQIQDDYLDCFGTPEQIGKIGTDIQDNKCSWVINKALELASAEQRKTLDENYGKKDSVAEAKCKKIFNDLKIEQLYHEYEESIAKDLKAKISQVDESRGFKADVLTAFLNKVYKRSK

SEQ ID NO: 1662 - protein, 509 aa, Artificial Sequence
  GPPS-GES engineered fusion
MEEAKWFNRGYIPTLDEYLANGVISGGTCMALVHAFFLMGKGVMKETEAMMEPYPRCFTSSGKILRLWDDLGTSREEQERGDVASSIECLMNEKNIALEDGARKHVRQLIGSLWIELNGELVAPTGLPLSTIKASFNLSRTAQAIYQHGNDNTASSVQDHVQSLFFNPIGFQTRSPNHRNVTLSNRGGGSMLRCSNTNAQLANLSEQVKGKVTEFDFKEYMRSKAMSVNEALDRAVPLRYPEKIHEAMRYSLLAGGKRVRPILCIAACELVGGSEELAMPTACAMEIIHTMSLIHDDLPCIDNDDLRRGKPTNHKVFGEGTAVLAGDALLSFAFEHIAVSTSKTVESDRVLRVVSELGRAIGSEGVAGGQVADITSQGNPSVGLETLEWIHIHKTAVLLECSVASGAIIGGASDDEIERVRKYARCVGLLFQVVDDILDVTKSSEELGKTAAKDLLSDKATYPKLMGLEKAKEFADELLGKAKEELSFFNPTKAAPLLGLADYIAQRQN

SEQ ID NO: 1663 - protein, 561 aa, Artificial Sequence
  GPPS-GES engineered fusion
MEEAKWFNRGYIPTLDEYLANGVISGGTCMALVHAFFLMGKGVMKETEAMMEPYPRCFTSSGKILRLWDDLGTSREEQERGDVASSIECLMNEKNIALEDGARKHVRQLIGSLWIELNGELVAPTGLPLSTIKASFNLSRTAQAIYQHGNDNTASSVQDHVQSLFFNPIGFQTRSPNHRNVTLSNRGGGSMKDVSLSSFDAHDLDLDKFPEVVRDRLTQFLDAQELTIADIGAPVTDAVAHLRSFVLNGGKRIRPLYAWAGFLAAQGHKNSSEKLESVLDAAASLEFIQACALIHDDIIDSSDTRRGAPTVHRAVEADHRANNFEGDPEHFGVSVSILAGDMALVWAEDMLQDSGLSAEALARTRDAWRGMRTEVIGGQLLDIYLESHANESVELADSVNRFKTAAYTIARPLHLGASIAGGSPQLIDALLHYGHDIGIAFQLRDDLLGVFGDPAITGKPAGDDIREGKRTVLLALALQRADKQSPEAATAIRAGVGKVTSPEDIAVITEHIRATGAEEEVEQRISQLTESGLAHLDDVDIPDEVRAQLRALAIRSTERRM

SEQ ID NO: 1664 - protein, 537 aa, Artificial Sequence
  GPPS-GES engineered fusion
MEEAKWFNRGYIPTLDEYLANGVISGGTCMALVHAFFLMGKGVMKETEAMMEPYPRCFTSSGKILRLWDDLGTSREEQERGDVASSIECLMNEKNIALEDGARKHVRQLIGSLWIELNGELVAPTGLPLSTIKASFNLSRTAQAIYQHGNDNTASSVQDHVQSLFFNPIGFQTRSPNHRNVTLSNRGGGSMLAEEQLDPFSLVADELSLLADRLRSMVVAEVPKLASAAEYFFKMGVEGKRFRPTVLLLMATALNVPLPRPALAEVPETLSTELRTRQQCIAEITEMIHVASLLHDDVLDDAETRRGIGSLNIMMGNKVAVLAGDFLLSRACVALASLKNTEVVSLLATVVEHLVTGETMQMTSTSEQRVSMEYYLQKTYYKTASLISNSCKAIALLAGQTAEVSMLAFEYGKNLGLAFQLIDDVLDFTGTSASLGKGSLSDIRHGIITAPILFAIEEFPQLDAVVKRGLDNPADIDLALDYLGKSRGIQRTRELAMKHANLAAEAIDSLPESGDEDVLRSRRALIDLTHRVITRTK

SEQ ID NO: 1665 - protein, 898 aa, Artificial Sequence
  GPPS-GES engineered fusion
MAFNMSRFVTMPSHVLPSSFVAPSLQVSSSPCSWRTRPSPCTSCHLSPSSSSKPLLGSHDYSLLKSLTLSPHAVNSEADSSTRRMKEVKERTWEAFYRAWDSRAAMEMVDTVERLGLSYHFEDEINALLQRFCDWNASEDLFTTALRFRLLRQNGFPTHSDVFGKFMDKNGKFKESLTEDIRGMLSLHEASHLGAKNEEVLAEAKEFTRIHLIQSMPHMEPHFSSHVGRALELPRHLRMVRLEARNYIGEYSRESNPNLAFLELAKLDFDMVQSLHQKELAEILRWWKQLGLVDKLDFARDRPMECFLWTVGIFPDPRHSSCRIELTKAIAILLVIDDIYDSYGSLDELALFTDAVKRWDLGAMDQLPEYMKICYMALYNTTNDIAYRILKEHGWSVIEHLKRTWMDIFGAFLAEAYCFKGGHVPSLEEYLTNAVTTGGTYMALVHAFFLMGQGVTRENMAMLKPYPNIFSCSGKILRLWDDLGTAREEQERGDNASSIECYKREREMDTVLEDEACRKHIRQMIQSLWVELNGELVASSALPLSIIKAAFNLSRTAQVIYQHGDDNKTSSVEDHVQALLFRPVSSNGHAQITMHGGGSMDFPQQLEACVKQANQALSRFIAPLPFQNTPVVETMQYGALLGGKRLRPFLVYATGHMFGVSTNTLDAPAAAVECIHAYFLIHDDLPAMDDDDLRRGLPTCHVKFGEANAILAGDALQTLAFSILSDADMPEVSDRDRISMISELASASGIAGMCGGQALDLDAEGKHVPLDALERIHRHKTGALIRAAVRLGALSAGDKGRRALPVLDKYAESIGLAFQVQDDILDVVGDTATLGKRQGADQQLGKSTYPALLGLEQARKKARDLIDDARQSLKQLAEQSLDTSALEALADYIIQRNK

SEQ ID NO: 1666 - protein, 951 aa, Artificial Sequence
  GPPS-GES engineered fusion
MAFNMSRFVTMPSHVLPSSFVAPSLQVSSSPCSWRTRPSPCTSCHLSPSSSSKPLLGSHDYSLLKSLTLSPHAVNSEADSSTRRMKEVKERTWEAFYRAWDSRAAMEMVDTVERLGLSYHFEDEINALLQRFCDWNASEDLFTTALRFRLLRQNGFPTHSDVFGKFMDKNGKFKESLTEDIRGMLSLHEASHLGAKNEEVLAEAKEFTRIHLIQSMPHMEPHFSSHVGRALELPRHLRMVRLEARNYIGEYSRESNPNLAFLELAKLDFDMVQSLHQKELAEILRWWKQLGLVDKLDFARDRPMECFLWTVGIFPDPRHSSCRIELTKAIAILLVIDDIYDSYGSLDELALFTDAVKRWDLGAMDQLPEYMKICYMALYNTTNDIAYRILKEHGWSVIEHLKRTWMDIFGAFLAEAYCFKGGHVPSLEEYLTNAVTTGGTYMALVHAFFLMGQGVTRENMAMLKPYPNIFSCSGKILRLWDDLGTAREEQERGDNASSIECYKREREMDTVLEDEACRKHIRQMIQSLWVELNGELVASSALPLSIIKAAFNLSRTAQVIYQHGDDNKTSSVEDHVQALLFRPVSSNGHAQITMHGGGSMASEKEIRRERFLNVFPKLVEELNASLLAYGMPKEACDWYAHSLNYNTPGGKLNRGLSVVDTYAILSNKTVEQLGQEEYEKVAILGWCIELLQAYWLVADDMMDKSITRRGQPCWYKVPEVGEIAIWDAFMLEAAIYKLLKSHFRNEKYYIDITELFHEVTFQTELGQLMDLITAPEDKVDLSKFSLKKHSFIVTFKTAYYSFYLPVALAMYVAGITDEKDLKQARDVLIPLGEYFQIQDDYLDCFGTPEQIGKIGTDIQDNKCSWVINKALELASAEQRKTLDENYGKKDSVAEAKCKKIFNDLKIEQLYHEYEESIAKDLKAKISQVDESRGFKADVLTAFLNKVYKRSK

SEQ ID NO: 1667 - protein, 918 aa, Artificial Sequence
  GPPS-GES engineered fusion
MAFNMSRFVTMPSHVLPSSFVAPSLQVSSSPCSWRTRPSPCTSCHLSPSSSSKPLLGSHDYSLLKSLTLSPHAVNSEADSSTRRMKEVKERTWEAFYRAWDSRAAMEMVDTVERLGLSYHFEDEINALLQRFCDWNASEDLFTTALRFRLLRQNGFPTHSDVFGKFMDKNGKFKESLTEDIRGMLSLHEASHLGAKNEEVLAEAKEFTRIHLIQSMPHMEPHFSSHVGRALELPRHLRMVRLEARNYIGEYSRESNPNLAFLELAKLDFDMVQSLHQKELAEILRWWKQLGLVDKLDFARDRPMECFLWTVGIFPDPRHSSCRIELTKAIAILLVIDDIYDSYGSLDELALFTDAVKRWDLGAMDQLPEYMKICYMALYNTTNDIAYRILKEHGWSVIEHLKRTWMDIFGAFLAEAYCFKGGHVPSLEEYLTNAVTTGGTYMALVHAFFLMGQGVTRENMAMLKPYPNIFSCSGKILRLWDDLGTAREEQERGDNASSIECYKREREMDTVLEDEACRKHIRQMIQSLWVELNGELVASSALPLSIIKAAFNLSRTAQVIYQHGDDNKTSSVEDHVQALLFRPVSSNGHAQITMHGGGSMLRCSNTNAQLANLSEQVKGKVTEFDFKEYMRSKAMSVNEALDRAVPLRYPEKIHEAMRYSLLAGGKRVRPILCIAACELVGGSEELAMPTACAMEIIHTMSLIHDDLPCIDNDDLRRGKPTNHKVFGEGTAVLAGDALLSFAFEHIAVSTSKTVESDRVLRVVSELGRAIGSEGVAGGQVADITSQGNPSVGLETLEWIHIHKTAVLLECSVASGAIIGGASDDEIERVRKYARCVGLLFQVVDDILDVTKSSEELGKTAAKDLLSDKATYPKLMGLEKAKEFADELLGKAKEELSFFNPTKAAPLLGLADYIAQRQN

SEQ ID NO: 1668 - protein, 970 aa, Artificial Sequence
  GPPS-GES engineered fusion
MAFNMSRFVTMPSHVLPSSFVAPSLQVSSSPCSWRTRPSPCTSCHLSPSSSSKPLLGSHDYSLLKSLTLSPHAVNSEADSSTRRMKEVKERTWEAFYRAWDSRAAMEMVDTVERLGLSYHFEDEINALLQRFCDWNASEDLFTTALRFRLLRQNGFPTHSDVFGKFMDKNGKFKESLTEDIRGMLSLHEASHLGAKNEEVLAEAKEFTRIHLIQSMPHMEPHFSSHVGRALELPRHLRMVRLEARNYIGEYSRESNPNLAFLELAKLDFDMVQSLHQKELAEILRWWKQLGLVDKLDFARDRPMECFLWTVGIFPDPRHSSCRIELTKAIAILLVIDDIYDSYGSLDELALFTDAVKRWDLGAMDQLPEYMKICYMALYNTTNDIAYRILKEHGWSVIEHLKRTWMDIFGAFLAEAYCFKGGHVPSLEEYLTNAVTTGGTYMALVHAFFLMGQGVTRENMAMLKPYPNIFSCSGKILRLWDDLGTAREEQERGDNASSIECYKREREMDTVLEDEACRKHIRQMIQSLWVELNGELVASSALPLSIIKAAFNLSRTAQVIYQHGDDNKTSSVEDHVQALLFRPVSSNGHAQITMHGGGSMKDVSLSSFDAHDLDLDKFPEVVRDRLTQFLDAQELTIADIGAPVTDAVAHLRSFVLNGGKRIRPLYAWAGFLAAQGHKNSSEKLESVLDAAASLEFIQACALIHDDIIDSSDTRRGAPTVHRAVEADHRANNFEGDPEHFGVSVSILAGDMALVWAEDMLQDSGLSAEALARTRDAWRGMRTEVIGGQLLDIYLESHANESVELADSVNRFKTAAYTIARPLHLGASIAGGSPQLIDALLHYGHDIGIAFQLRDDLLGVFGDPAITGKPAGDDIREGKRTVLLALALQRADKQSPEAATAIRAGVGKVTSPEDIAVITEHIRATGAEEEVEQRISQLTESGLAHLDDVDIPDEVRAQLRALAIRSTERRM

SEQ ID NO: 1669 - protein, 946 aa, Artificial Sequence
  GPPS-GES engineered fusion
MAFNMSRFVTMPSHVLPSSFVAPSLQVSSSPCSWRTRPSPCTSCHLSPSSSSKPLLGSHDYSLLKSLTLSPHAVNSEADSSTRRMKEVKERTWEAFYRAWDSRAAMEMVDTVERLGLSYHFEDEINALLQRFCDWNASEDLFTTALRFRLLRQNGFPTHSDVFGKFMDKNGKFKESLTEDIRGMLSLHEASHLGAKNEEVLAEAKEFTRIHLIQSMPHMEPHFSSHVGRALELPRHLRMVRLEARNYIGEYSRESNPNLAFLELAKLDFDMVQSLHQKELAEILRWWKQLGLVDKLDFARDRPMECFLWTVGIFPDPRHSSCRIELTKAIAILLVIDDIYDSYGSLDELALFTDAVKRWDLGAMDQLPEYMKICYMALYNTTNDIAYRILKEHGWSVIEHLKRTWMDIFGAFLAEAYCFKGGHVPSLEEYLTNAVTTGGTYMALVHAFFLMGQGVTRENMAMLKPYPNIFSCSGKILRLWDDLGTAREEQERGDNASSIECYKREREMDTVLEDEACRKHIRQMIQSLWVELNGELVASSALPLSIIKAAFNLSRTAQVIYQHGDDNKTSSVEDHVQALLFRPVSSNGHAQITMHGGGSMLAEEQLDPFSLVADELSLLADRLRSMVVAEVPKLASAAEYFFKMGVEGKRFRPTVLLLMATALNVPLPRPALAEVPETLSTELRTRQQCIAEITEMIHVASLLHDDVLDDAETRRGIGSLNIMMGNKVAVLAGDFLLSRACVALASLKNTEVVSLLATVVEHLVTGETMQMTSTSEQRVSMEYYLQKTYYKTASLISNSCKAIALLAGQTAEVSMLAFEYGKNLGLAFQLIDDVLDFTGTSASLGKGSLSDIRHGIITAPILFAIEEFPQLDAVVKRGLDNPADIDLALDYLGKSRGIQRTRELAMKHANLAAEAIDSLPESGDEDVLRSRRALIDLTHRVITRTK

SEQ ID NO: 1670 - protein, 890 aa, Artificial Sequence
  GPPS-GES engineered fusion
MGCIRSTTHTSTNYGINSRLGLSFPVPIIYRPAGASRNISIYMSSSAAPNVTQVVVGANDALLQYTHQPMLIPSEVDADTERRDYLLEKARQELSRTTKPTDKLKLIDMIQRLGIGFYLEDDINAILRTQFSVNVIDEEDLSATGLRFRMLRQNSFPISSDIFKRFQDQNEKFDETLTNDTLGVIELVRSIIHGEPKGEEILEEAMEFSKTRLKRSLSSLPAQIKADVGQALELPTHLRMARLEARRFIEQYATQSDHNPILLELATLDYNHVQSQHQMELVEITRWWKQLGLVDQLSFARDRPLECFLWTVGLLPEPKYSSCRIELAKTIAVLLVIDDIFDTYGKMDDLILFTDAIQRWDLGAMESLPEYMKICYMALYNLTNEICYKVLKENGWTVLPYLKSSWIDMIEGFMVEAKWFNGGCAPNLEEYVENGVSTAGSYMALVHLFFLIGEGVTEQNAQLLMKKPYPKAFSSAGRILRLWDDLGTAKEEQERGDLASSINLFMKERNLATEEEGRECILEDIYGYWKDLNGELVSQKEMPLAIIKVALNMARASQVVYKHEEDSYFSNVDNYVQALLFTPLIIGGGGSMDFPQQLEACVKQANQALSRFIAPLPFQNTPVVETMQYGALLGGKRLRPFLVYATGHMFGVSTNTLDAPAAAVECIHAYFLIHDDLPAMDDDDLRRGLPTCHVKFGEANAILAGDALQTLAFSILSDADMPEVSDRDRISMISELASASGIAGMCGGQALDLDAEGKHVPLDALERIHRHKTGALIRAAVRLGALSAGDKGRRALPVLDKYAESIGLAFQVQDDILDVVGDTATLGKRQGADQQLGKSTYPALLGLEQARKKARDLIDDARQSLKQLAEQSLDTSALEALADYIIQRNK

SEQ ID NO: 1671 - protein, 943 aa, Artificial Sequence
  GPPS-GES engineered fusion
MGCIRSTTHTSTNYGINSRLGLSFPVPIIYRPAGASRNISIYMSSSAAPNVTQVVVGANDALLQYTHQPMLIPSEVDADTERRDYLLEKARQELSRTTKPTDKLKLIDMIQRLGIGFYLEDDINAILRTQFSVNVIDEEDLSATGLRFRMLRQNSFPISSDIFKRFQDQNEKFDETLTNDTLGVIELVRSIIHGEPKGEEILEEAMEFSKTRLKRSLSSLPAQIKADVGQALELPTHLRMARLEARRFIEQYATQSDHNPILLELATLDYNHVQSQHQMELVEITRWWKQLGLVDQLSFARDRPLECFLWTVGLLPEPKYSSCRIELAKTIAVLLVIDDIFDTYGKMDDLILFTDAIQRWDLGAMESLPEYMKICYMALYNLTNEICYKVLKENGWTVLPYLKSSWIDMIEGFMVEAKWFNGGCAPNLEEYVENGVSTAGSYMALVHLFFLIGEGVTEQNAQLLMKKPYPKAFSSAGRILRLWDDLGTAKEEQERGDLASSINLFMKERNLATEEEGRECILEDIYGYWKDLNGELVSQKEMPLAIIKVALNMARASQVVYKHEEDSYFSNVDNYVQALLFTPLIIGGGGSMASEKEIRRERFLNVFPKLVEELNASLLAYGMPKEACDWYAHSLNYNTPGGKLNRGLSVVDTYAILSNKTVEQLGQEEYEKVAILGWCIELLQAYWLVADDMMDKSITRRGQPCWYKVPEVGEIAIWDAFMLEAAIYKLLKSHFRNEKYYIDITELFHEVTFQTELGQLMDLITAPEDKVDLSKFSLKKHSFIVTFKTAYYSFYLPVALAMYVAGITDEKDLKQARDVLIPLGEYFQIQDDYLDCFGTPEQIGKIGTDIQDNKCSWVINKALELASAEQRKTLDENYGKKDSVAEAKCKKIFNDLKIEQLYHEYEESIAKDLKAKISQVDESRGFKADVLTAFLNKVYKRSK

SEQ ID NO: 1672 - protein, 910 aa, Artificial Sequence
  GPPS-GES engineered fusion
MGCIRSTTHTSTNYGINSRLGLSFPVPIIYRPAGASRNISIYMSSSAAPNVTQVVVGANDALLQYTHQPMLIPSEVDADTERRDYLLEKARQELSRTTKPTDKLKLIDMIQRLGIGFYLEDDINAILRTQFSVNVIDEEDLSATGLRFRMLRQNSFPISSDIFKRFQDQNEKFDETLTNDTLGVIELVRSIIHGEPKGEEILEEAMEFSKTRLKRSLSSLPAQIKADVGQALELPTHLRMARLEARRFIEQYATQSDHNPILLELATLDYNHVQSQHQMELVEITRWWKQLGLVDQLSFARDRPLECFLWTVGLLPEPKYSSCRIELAKTIAVLLVIDDIFDTYGKMDDLILFTDAIQRWDLGAMESLPEYMKICYMALYNLTNEICYKVLKENGWTVLPYLKSSWIDMIEGFMVEAKWFNGGCAPNLEEYVENGVSTAGSYMALVHLFFLIGEGVTEQNAQLLMKKPYPKAFSSAGRILRLWDDLGTAKEEQERGDLASSINLFMKERNLATEEEGRECILEDIYGYWKDLNGELVSQKEMPLAIIKVALNMARASQVVYKHEEDSYFSNVDNYVQALLFTPLIIGGGGSMLRCSNTNAQLANLSEQVKGKVTEFDFKEYMRSKAMSVNEALDRAVPLRYPEKIHEAMRYSLLAGGKRVRPILCIAACELVGGSEELAMPTACAMEIIHTMSLIHDDLPCIDNDDLRRGKPTNHKVFGEGTAVLAGDALLSFAFEHIAVSTSKTVESDRVLRVVSELGRAIGSEGVAGGQVADITSQGNPSVGLETLEWIHIHKTAVLLECSVASGAIIGGASDDEIERVRKYARCVGLLFQVVDDILDVTKSSEELGKTAAKDLLSDKATYPKLMGLEKAKEFADELLGKAKEELSFFNPTKAAPLLGLADYIAQRQN

SEQ ID NO: 1673 - protein, 962 aa, Artificial Sequence
  GPPS-GES engineered fusion
MGCIRSTTHTSTNYGINSRLGLSFPVPIIYRPAGASRNISIYMSSSAAPNVTQVVVGANDALLQYTHQPMLIPSEVDADTERRDYLLEKARQELSRTTKPTDKLKLIDMIQRLGIGFYLEDDINAILRTQFSVNVIDEEDLSATGLRFRMLRQNSFPISSDIFKRFQDQNEKFDETLTNDTLGVIELVRSIIHGEPKGEEILEEAMEFSKTRLKRSLSSLPAQIKADVGQALELPTHLRMARLEARRFIEQYATQSDHNPILLELATLDYNHVQSQHQMELVEITRWWKQLGLVDQLSFARDRPLECFLWTVGLLPEPKYSSCRIELAKTIAVLLVIDDIFDTYGKMDDLILFTDAIQRWDLGAMESLPEYMKICYMALYNLTNEICYKVLKENGWTVLPYLKSSWIDMIEGFMVEAKWFNGGCAPNLEEYVENGVSTAGSYMALVHLFFLIGEGVTEQNAQLLMKKPYPKAFSSAGRILRLWDDLGTAKEEQERGDLASSINLFMKERNLATEEEGRECILEDIYGYWKDLNGELVSQKEMPLAIIKVALNMARASQVVYKHEEDSYFSNVDNYVQALLFTPLIIGGGGSMKDVSLSSFDAHDLDLDKFPEVVRDRLTQFLDAQELTIADIGAPVTDAVAHLRSFVLNGGKRIRPLYAWAGFLAAQGHKNSSEKLESVLDAAASLEFIQACALIHDDIIDSSDTRRGAPTVHRAVEADHRANNFEGDPEHFGVSVSILAGDMALVWAEDMLQDSGLSAEALARTRDAWRGMRTEVIGGQLLDIYLESHANESVELADSVNRFKTAAYTIARPLHLGASIAGGSPQLIDALLHYGHDIGIAFQLRDDLLGVFGDPAITGKPAGDDIREGKRTVLLALALQRADKQSPEAATAIRAGVGKVTSPEDIAVITEHIRATGAEEEVEQRISQLTESGLAHLDDVDIPDEVRAQLRALAIRSTERRM

SEQ ID NO: 1674 - protein, 938 aa, Artificial Sequence
  GPPS-GES engineered fusion
MGCIRSTTHTSTNYGINSRLGLSFPVPIIYRPAGASRNISIYMSSSAAPNVTQVVVGANDALLQYTHQPMLIPSEVDADTERRDYLLEKARQELSRTTKPTDKLKLIDMIQRLGIGFYLEDDINAILRTQFSVNVIDEEDLSATGLRFRMLRQNSFPISSDIFKRFQDQNEKFDETLTNDTLGVIELVRSIIHGEPKGEEILEEAMEFSKTRLKRSLSSLPAQIKADVGQALELPTHLRMARLEARRFIEQYATQSDHNPILLELATLDYNHVQSQHQMELVEITRWWKQLGLVDQLSFARDRPLECFLWTVGLLPEPKYSSCRIELAKTIAVLLVIDDIFDTYGKMDDLILFTDAIQRWDLGAMESLPEYMKICYMALYNLTNEICYKVLKENGWTVLPYLKSSWIDMIEGFMVEAKWFNGGCAPNLEEYVENGVSTAGSYMALVHLFFLIGEGVTEQNAQLLMKKPYPKAFSSAGRILRLWDDLGTAKEEQERGDLASSINLFMKERNLATEEEGRECILEDIYGYWKDLNGELVSQKEMPLAIIKVALNMARASQVVYKHEEDSYFSNVDNYVQALLFTPLIIGGGGSMLAEEQLDPFSLVADELSLLADRLRSMVVAEVPKLASAAEYFFKMGVEGKRFRPTVLLLMATALNVPLPRPALAEVPETLSTELRTRQQCIAEITEMIHVASLLHDDVLDDAETRRGIGSLNIMMGNKVAVLAGDFLLSRACVALASLKNTEVVSLLATVVEHLVTGETMQMTSTSEQRVSMEYYLQKTYYKTASLISNSCKAIALLAGQTAEVSMLAFEYGKNLGLAFQLIDDVLDFTGTSASLGKGSLSDIRHGIITAPILFAIEEFPQLDAVVKRGLDNPADIDLALDYLGKSRGIQRTRELAMKHANLAAEAIDSLPESGDEDVLRSRRALIDLTHRVITRTK

SEQ ID NO: 1675 - protein, 443 aa, Artificial Sequence
  GPPS-GES engineered fusion
MQEAVAKVAQLIIIIDDIYDVYGTVDELELFTNAIDRWDLEAMEQLPEYMKTCFLALYNSINEIGYEILKEEGRNVIPYLRNTWTELCKAFLVEAKWYSSGYTPTLEEYLQTSWISIGSLPMQTYVFALLGKNLAPESSGGGGSMDFPQQLEACVKQANQALSRFIAPLPFQNTPVVETMQYGALLGGKRLRPFLVYATGHMFGVSTNTLDAPAAAVECIHAYFLIHDDLPAMDDDDLRRGLPTCHVKFGEANAILAGDALQTLAFSILSDADMPEVSDRDRISMISELASASGIAGMCGGQALDLDAEGKHVPLDALERIHRHKTGALIRAAVRLGALSAGDKGRRALPVLDKYAESIGLAFQVQDDILDVVGDTATLGKRQGADQQLGKSTYPALLGLEQARKKARDLIDDARQSLKQLAEQSLDTSALEALADYIIQRNK

SEQ ID NO: 1676 - protein, 496 aa, Artificial Sequence
  GPPS-GES engineered fusion
MQEAVAKVAQLIIIIDDIYDVYGTVDELELFTNAIDRWDLEAMEQLPEYMKTCFLALYNSINEIGYEILKEEGRNVIPYLRNTWTELCKAFLVEAKWYSSGYTPTLEEYLQTSWISIGSLPMQTYVFALLGKNLAPESSGGGGSMASEKEIRRERFLNVFPKLVEELNASLLAYGMPKEACDWYAHSLNYNTPGGKLNRGLSVVDTYAILSNKTVEQLGQEEYEKVAILGWCIELLQAYWLVADDMMDKSITRRGQPCWYKVPEVGEIAIWDAFMLEAAIYKLLKSHFRNEKYYIDITELFHEVTFQTELGQLMDLITAPEDKVDLSKFSLKKHSFIVTFKTAYYSFYLPVALAMYVAGITDEKDLKQARDVLIPLGEYFQIQDDYLDCFGTPEQIGKIGTDIQDNKCSWVINKALELASAEQRKTLDENYGKKDSVAEAKCKKIFNDLKIEQLYHEYEESIAKDLKAKISQVDESRGFKADVLTAFLNKVYKRSK

SEQ ID NO: 1677 - protein, 463 aa, Artificial Sequence
  GPPS-GES engineered fusion
MQEAVAKVAQLIIIIDDIYDVYGTVDELELFTNAIDRWDLEAMEQLPEYMKTCFLALYNSINEIGYEILKEEGRNVIPYLRNTWTELCKAFLVEAKWYSSGYTPTLEEYLQTSWISIGSLPMQTYVFALLGKNLAPESSGGGGSMLRCSNTNAQLANLSEQVKGKVTEFDFKEYMRSKAMSVNEALDRAVPLRYPEKIHEAMRYSLLAGGKRVRPILCIAACELVGGSEELAMPTACAMEIIHTMSLIHDDLPCIDNDDLRRGKPTNHKVFGEGTAVLAGDALLSFAFEHIAVSTSKTVESDRVLRVVSELGRAIGSEGVAGGQVADITSQGNPSVGLETLEWIHIHKTAVLLECSVASGAIIGGASDDEIERVRKYARCVGLLFQVVDDILDVTKSSEELGKTAAKDLLSDKATYPKLMGLEKAKEFADELLGKAKEELSFFNPTKAAPLLGLADYIAQRQN

SEQ ID NO: 1678 - protein, 515 aa, Artificial Sequence
  GPPS-GES engineered fusion
MQEAVAKVAQLIIIIDDIYDVYGTVDELELFTNAIDRWDLEAMEQLPEYMKTCFLALYNSINEIGYEILKEEGRNVIPYLRNTWTELCKAFLVEAKWYSSGYTPTLEEYLQTSWISIGSLPMQTYVFALLGKNLAPESSGGGGSMKDVSLSSFDAHDLDLDKFPEVVRDRLTQFLDAQELTIADIGAPVTDAVAHLRSFVLNGGKRIRPLYAWAGFLAAQGHKNSSEKLESVLDAAASLEFIQACALIHDDIIDSSDTRRGAPTVHRAVEADHRANNFEGDPEHFGVSVSILAGDMALVWAEDMLQDSGLSAEALARTRDAWRGMRTEVIGGQLLDIYLESHANESVELADSVNRFKTAAYTIARPLHLGASIAGGSPQLIDALLHYGHDIGIAFQLRDDLLGVFGDPAITGKPAGDDIREGKRTVLLALALQRADKQSPEAATAIRAGVGKVTSPEDIAVITEHIRATGAEEEVEQRISQLTESGLAHLDDVDIPDEVRAQLRALAIRSTERRM

SEQ ID NO: 1679 - protein, 491 aa, Artificial Sequence
  GPPS-GES engineered fusion
MQEAVAKVAQLIIIIDDIYDVYGTVDELELFTNAIDRWDLEAMEQLPEYMKTCFLALYNSINEIGYEILKEEGRNVIPYLRNTWTELCKAFLVEAKWYSSGYTPTLEEYLQTSWISIGSLPMQTYVFALLGKNLAPESSGGGGSMLAEEQLDPFSLVADELSLLADRLRSMVVAEVPKLASAAEYFFKMGVEGKRFRPTVLLLMATALNVPLPRPALAEVPETLSTELRTRQQCIAEITEMIHVASLLHDDVLDDAETRRGIGSLNIMMGNKVAVLAGDFLLSRACVALASLKNTEVVSLLATVVEHLVTGETMQMTSTSEQRVSMEYYLQKTYYKTASLISNSCKAIALLAGQTAEVSMLAFEYGKNLGLAFQLIDDVLDFTGTSASLGKGSLSDIRHGIITAPILFAIEEFPQLDAVVKRGLDNPADIDLALDYLGKSRGIQRTRELAMKHANLAAEAIDSLPESGDEDVLRSRRALIDLTHRVITRTK

SEQ ID NO: 1680 - protein, 907 aa, Artificial Sequence
  GPPS-GES engineered fusion
MSSISQKVVIGLNKAAANNNLQNLDRRGFKTRCVSSSKAASCLRASCSLQLDVKPVQEGRRSGNYQPSIWDFNYVQSLNTPYKEERYLTRHAELIVQVKPLLEKKMEPAQQLELIDDLNNLGLSYFFQDRIKQILSFIYDENQCFHSNINDQAEKRDLYFTALGFRLLRQHGFDVSQEVFDCFKNDNGSDFKASLSDNTKGLLQLYEASFLVREGEDTLEQARQFATKFLRRKLDEIDDNHLLSCIHHSLEIPLHWRIQRLEARWFLDAYATRHDMNPVILELAKLDFNIIQATHQEELKDVSRWWQNTRLAEKLPFVRDRLVESYFWAIALFEPHQYGYQRRVAAKIITLATSIDDVYDIYGTLDELQLFTDNFRRWDTESLGRLPYSMQLFYMVIHNFVSELAYEILKEKGFIVIPYLQRSWVDLAESFLKEANWYYSGYTPSLEEYIDNGSISIGAVAVLSQVYFTLANSIEKPKIESMYKYHHILRLSGLLVRLHDDLGTSLFEKKRGDVPKAVEICMKERNVTEEEAEEHVKYLIREAWKEMNTATTAAGCPFMDELNVAAANLGRAAQFVYLDGDGHGVQHSKIHQQMGGLMFEPYVGGGGSMDFPQQLEACVKQANQALSRFIAPLPFQNTPVVETMQYGALLGGKRLRPFLVYATGHMFGVSTNTLDAPAAAVECIHAYFLIHDDLPAMDDDDLRRGLPTCHVKFGEANAILAGDALQTLAFSILSDADMPEVSDRDRISMISELASASGIAGMCGGQALDLDAEGKHVPLDALERIHRHKTGALIRAAVRLGALSAGDKGRRALPVLDKYAESIGLAFQVQDDILDVVGDTATLGKRQGADQQLGKSTYPALLGLEQARKKARDLIDDARQSLKQLAEQSLDTSALEALADYIIQRNK

SEQ ID NO: 1681 - protein, 960 aa, Artificial Sequence
  GPPS-GES engineered fusion
MSSISQKVVIGLNKAAANNNLQNLDRRGFKTRCVSSSKAASCLRASCSLQLDVKPVQEGRRSGNYQPSIWDFNYVQSLNTPYKEERYLTRHAELIVQVKPLLEKKMEPAQQLELIDDLNNLGLSYFFQDRIKQILSFIYDENQCFHSNINDQAEKRDLYFTALGFRLLRQHGFDVSQEVFDCFKNDNGSDFKASLSDNTKGLLQLYEASFLVREGEDTLEQARQFATKFLRRKLDEIDDNHLLSCIHHSLEIPLHWRIQRLEARWFLDAYATRHDMNPVILELAKLDFNIIQATHQEELKDVSRWWQNTRLAEKLPFVRDRLVESYFWAIALFEPHQYGYQRRVAAKIITLATSIDDVYDIYGTLDELQLFTDNFRRWDTESLGRLPYSMQLFYMVIHNFVSELAYEILKEKGFIVIPYLQRSWVDLAESFLKEANWYYSGYTPSLEEYIDNGSISIGAVAVLSQVYFTLANSIEKPKIESMYKYHHILRLSGLLVRLHDDLGTSLFEKKRGDVPKAVEICMKERNVTEEEAEEHVKYLIREAWKEMNTATTAAGCPFMDELNVAAANLGRAAQFVYLDGDGHGVQHSKIHQQMGGLMFEPYVGGGGSMASEKEIRRERFLNVFPKLVEELNASLLAYGMPKEACDWYAHSLNYNTPGGKLNRGLSVVDTYAILSNKTVEQLGQEEYEKVAILGWCIELLQAYWLVADDMMDKSITRRGQPCWYKVPEVGEIAIWDAFMLEAAIYKLLKSHFRNEKYYIDITELFHEVTFQTELGQLMDLITAPEDKVDLSKFSLKKHSFIVTFKTAYYSFYLPVALAMYVAGITDEKDLKQARDVLIPLGEYFQIQDDYLDCFGTPEQIGKIGTDIQDNKCSWVINKALELASAEQRKTLDENYGKKDSVAEAKCKKIFNDLKIEQLYHEYEESIAKDLKAKISQVDESRGFKADVLTAFLNKVYKRSK

SEQ ID NO: 1682 - protein, 927 aa, Artificial Sequence
  GPPS-GES engineered fusion
MSSISQKVVIGLNKAAANNNLQNLDRRGFKTRCVSSSKAASCLRASCSLQLDVKPVQEGRRSGNYQPSIWDFNYVQSLNTPYKEERYLTRHAELIVQVKPLLEKKMEPAQQLELIDDLNNLGLSYFFQDRIKQILSFIYDENQCFHSNINDQAEKRDLYFTALGFRLLRQHGFDVSQEVFDCFKNDNGSDFKASLSDNTKGLLQLYEASFLVREGEDTLEQARQFATKFLRRKLDEIDDNHLLSCIHHSLEIPLHWRIQRLEARWFLDAYATRHDMNPVILELAKLDFNIIQATHQEELKDVSRWWQNTRLAEKLPFVRDRLVESYFWAIALFEPHQYGYQRRVAAKIITLATSIDDVYDIYGTLDELQLFTDNFRRWDTESLGRLPYSMQLFYMVIHNFVSELAYEILKEKGFIVIPYLQRSWVDLAESFLKEANWYYSGYTPSLEEYIDNGSISIGAVAVLSQVYFTLANSIEKPKIESMYKYHHILRLSGLLVRLHDDLGTSLFEKKRGDVPKAVEICMKERNVTEEEAEEHVKYLIREAWKEMNTATTAAGCPFMDELNVAAANLGRAAQFVYLDGDGHGVQHSKIHQQMGGLMFEPYVGGGGSMLRCSNTNAQLANLSEQVKGKVTEFDFKEYMRSKAMSVNEALDRAVPLRYPEKIHEAMRYSLLAGGKRVRPILCIAACELVGGSEELAMPTACAMEIIHTMSLIHDDLPCIDNDDLRRGKPTNHKVFGEGTAVLAGDALLSFAFEHIAVSTSKTVESDRVLRVVSELGRAIGSEGVAGGQVADITSQGNPSVGLETLEWIHIHKTAVLLECSVASGAIIGGASDDEIERVRKYARCVGLLFQVVDDILDVTKSSEELGKTAAKDLLSDKATYPKLMGLEKAKEFADELLGKAKEELSFFNPTKAAPLLGLADYIAQRQN

SEQ ID NO: 1683 - protein, 979 aa, Artificial Sequence
  GPPS-GES engineered fusion
MSSISQKVVIGLNKAAANNNLQNLDRRGFKTRCVSSSKAASCLRASCSLQLDVKPVQEGRRSGNYQPSIWDFNYVQSLNTPYKEERYLTRHAELIVQVKPLLEKKMEPAQQLELIDDLNNLGLSYFFQDRIKQILSFIYDENQCFHSNINDQAEKRDLYFTALGFRLLRQHGFDVSQEVFDCFKNDNGSDFKASLSDNTKGLLQLYEASFLVREGEDTLEQARQFATKFLRRKLDEIDDNHLLSCIHHSLEIPLHWRIQRLEARWFLDAYATRHDMNPVILELAKLDFNIIQATHQEELKDVSRWWQNTRLAEKLPFVRDRLVESYFWAIALFEPHQYGYQRRVAAKIITLATSIDDVYDIYGTLDELQLFTDNFRRWDTESLGRLPYSMQLFYMVIHNFVSELAYEILKEKGFIVIPYLQRSWVDLAESFLKEANWYYSGYTPSLEEYIDNGSISIGAVAVLSQVYFTLANSIEKPKIESMYKYHHILRLSGLLVRLHDDLGTSLFEKKRGDVPKAVEICMKERNVTEEEAEEHVKYLIREAWKEMNTATTAAGCPFMDELNVAAANLGRAAQFVYLDGDGHGVQHSKIHQQMGGLMFEPYVGGGGSMKDVSLSSFDAHDLDLDKFPEVVRDRLTQFLDAQELTIADIGAPVTDAVAHLRSFVLNGGKRIRPLYAWAGFLAAQGHKNSSEKLESVLDAAASLEFIQACALIHDDIIDSSDTRRGAPTVHRAVEADHRANNFEGDPEHFGVSVSILAGDMALVWAEDMLQDSGLSAEALARTRDAWRGMRTEVIGGQLLDIYLESHANESVELADSVNRFKTAAYTIARPLHLGASIAGGSPQLIDALLHYGHDIGIAFQLRDDLLGVFGDPAITGKPAGDDIREGKRTVLLALALQRADKQSPEAATAIRAGVGKVTSPEDIAVITEHIRATGAEEEVEQRISQLTESGLAHLDDVDIPDEVRAQLRALAIRSTERRM

SEQ ID NO: 1684 - protein, 955 aa, Artificial Sequence
  GPPS-GES engineered fusion
MSSISQKVVIGLNKAAANNNLQNLDRRGFKTRCVSSSKAASCLRASCSLQLDVKPVQEGRRSGNYQPSIWDFNYVQSLNTPYKEERYLTRHAELIVQVKPLLEKKMEPAQQLELIDDLNNLGLSYFFQDRIKQILSFIYDENQCFHSNINDQAEKRDLYFTALGFRLLRQHGFDVSQEVFDCFKNDNGSDFKASLSDNTKGLLQLYEASFLVREGEDTLEQARQFATKFLRRKLDEIDDNHLLSCIHHSLEIPLHWRIQRLEARWFLDAYATRHDMNPVILELAKLDFNIIQATHQEELKDVSRWWQNTRLAEKLPFVRDRLVESYFWAIALFEPHQYGYQRRVAAKIITLATSIDDVYDIYGTLDELQLFTDNFRRWDTESLGRLPYSMQLFYMVIHNFVSELAYEILKEKGFIVIPYLQRSWVDLAESFLKEANWYYSGYTPSLEEYIDNGSISIGAVAVLSQVYFTLANSIEKPKIESMYKYHHILRLSGLLVRLHDDLGTSLFEKKRGDVPKAVEICMKERNVTEEEAEEHVKYLIREAWKEMNTATTAAGCPFMDELNVAAANLGRAAQFVYLDGDGHGVQHSKIHQQMGGLMFEPYVGGGGSMLAEEQLDPFSLVADELSLLADRLRSMVVAEVPKLASAAEYFFKMGVEGKRFRPTVLLLMATALNVPLPRPALAEVPETLSTELRTRQQCIAEITEMIHVASLLHDDVLDDAETRRGIGSLNIMMGNKVAVLAGDFLLSRACVALASLKNTEVVSLLATVVEHLVTGETMQMTSTSEQRVSMEYYLQKTYYKTASLISNSCKAIALLAGQTAEVSMLAFEYGKNLGLAFQLIDDVLDFTGTSASLGKGSLSDIRHGIITAPILFAIEEFPQLDAVVKRGLDNPADIDLALDYLGKSRGIQRTRELAMKHANLAAEAIDSLPESGDEDVLRSRRALIDLTHRVITRTK

SEQ ID NO: 1685 - protein, 490 aa, Artificial Sequence
  GPPS-GES engineered fusion
MEEAKWFNRGYIPTLDEYLANGVISGGTCMALVHAFFLMGKGVMKETEAMMEPYPRCFTSSGKILRLWDDLGTSREEQERGDVASSIECLMNEKNIALEDGARKHVRQLIGSLWIELNGELVAPTGLPLSTIKASFNLSRTAQAIYQHGNDNTASSVQDHVQSLFFNPIGFQTRSPNHRNVTLSNRGGGGSMDFPQQLEACVKQANQALSRFIAPLPFQNTPVVETMQYGALLGGKRLRPFLVYATGHMFGVSTNTLDAPAAAVECIHAYFLIHDDLPAMDDDDLRRGLPTCHVKFGEANAILAGDALQTLAFSILSDADMPEVSDRDRISMISELASASGIAGMCGGQALDLDAEGKHVPLDALERIHRHKTGALIRAAVRLGALSAGDKGRRALPVLDKYAESIGLAFQVQDDILDVVGDTATLGKRQGADQQLGKSTYPALLGLEQARKKARDLIDDARQSLKQLAEQSLDTSALEALADYIIQRNK

SEQ ID NO: 1686 - protein, 543 aa, Artificial Sequence
  GPPS-GES engineered fusion
MEEAKWFNRGYIPTLDEYLANGVISGGTCMALVHAFFLMGKGVMKETEAMMEPYPRCFTSSGKILRLWDDLGTSREEQERGDVASSIECLMNEKNIALEDGARKHVRQLIGSLWIELNGELVAPTGLPLSTIKASFNLSRTAQAIYQHGNDNTASSVQDHVQSLFFNPIGFQTRSPNHRNVTLSNRGGGGSMASEKEIRRERFLNVFPKLVEELNASLLAYGMPKEACDWYAHSLNYNTPGGKLNRGLSVVDTYAILSNKTVEQLGQEEYEKVAILGWCIELLQAYWLVADDMMDKSITRRGQPCWYKVPEVGEIAIWDAFMLEAAIYKLLKSHFRNEKYYIDITELFHEVTFQTELGQLMDLITAPEDKVDLSKFSLKKHSFIVTFKTAYYSFYLPVALAMYVAGITDEKDLKQARDVLIPLGEYFQIQDDYLDCFGTPEQIGKIGTDIQDNKCSWVINKALELASAEQRKTLDENYGKKDSVAEAKCKKIFNDLKIEQLYHEYEESIAKDLKAKISQVDESRGFKADVLTAFLNKVYKRSK

SEQ ID NO: 1687 - protein, 510 aa, Artificial Sequence
  GPPS-GES engineered fusion
MEEAKWFNRGYIPTLDEYLANGVISGGTCMALVHAFFLMGKGVMKETEAMMEPYPRCFTSSGKILRLWDDLGTSREEQERGDVASSIECLMNEKNIALEDGARKHVRQLIGSLWIELNGELVAPTGLPLSTIKASFNLSRTAQAIYQHGNDNTASSVQDHVQSLFFNPIGFQTRSPNHRNVTLSNRGGGGSMLRCSNTNAQLANLSEQVKGKVTEFDFKEYMRSKAMSVNEALDRAVPLRYPEKIHEAMRYSLLAGGKRVRPILCIAACELVGGSEELAMPTACAMEIIHTMSLIHDDLPCIDNDDLRRGKPTNHKVFGEGTAVLAGDALLSFAFEHIAVSTSKTVESDRVLRVVSELGRAIGSEGVAGGQVADITSQGNPSVGLETLEWIHIHKTAVLLECSVASGAIIGGASDDEIERVRKYARCVGLLFQVVDDILDVTKSSEELGKTAAKDLLSDKATYPKLMGLEKAKEFADELLGKAKEELSFFNPTKAAPLLGLADYIAQRQN

SEQ ID NO: 1688 - protein, 562 aa, Artificial Sequence
  GPPS-GES engineered fusion
MEEAKWFNRGYIPTLDEYLANGVISGGTCMALVHAFFLMGKGVMKETEAMMEPYPRCFTSSGKILRLWDDLGTSREEQERGDVASSIECLMNEKNIALEDGARKHVRQLIGSLWIELNGELVAPTGLPLSTIKASFNLSRTAQAIYQHGNDNTASSVQDHVQSLFFNPIGFQTRSPNHRNVTLSNRGGGGSMKDVSLSSFDAHDLDLDKFPEVVRDRLTQFLDAQELTIADIGAPVTDAVAHLRSFVLNGGKRIRPLYAWAGFLAAQGHKNSSEKLESVLDAAASLEFIQACALIHDDIIDSSDTRRGAPTVHRAVEADHRANNFEGDPEHFGVSVSILAGDMALVWAEDMLQDSGLSAEALARTRDAWRGMRTEVIGGQLLDIYLESHANESVELADSVNRFKTAAYTIARPLHLGASIAGGSPQLIDALLHYGHDIGIAFQLRDDLLGVFGDPAITGKPAGDDIREGKRTVLLALALQRADKQSPEAATAIRAGVGKVTSPEDIAVITEHIRATGAEEEVEQRISQLTESGLAHLDDVDIPDEVRAQLRALAIRSTERRM

SEQ ID NO: 1689 - protein, 538 aa, Artificial Sequence
  GPPS-GES engineered fusion
MEEAKWFNRGYIPTLDEYLANGVISGGTCMALVHAFFLMGKGVMKETEAMMEPYPRCFTSSGKILRLWDDLGTSREEQERGDVASSIECLMNEKNIALEDGARKHVRQLIGSLWIELNGELVAPTGLPLSTIKASFNLSRTAQAIYQHGNDNTASSVQDHVQSLFFNPIGFQTRSPNHRNVTLSNRGGGGSMLAEEQLDPFSLVADELSLLADRLRSMVVAEVPKLASAAEYFFKMGVEGKRFRPTVLLLMATALNVPLPRPALAEVPETLSTELRTRQQCIAEITEMIHVASLLHDDVLDDAETRRGIGSLNIMMGNKVAVLAGDFLLSRACVALASLKNTEVVSLLATVVEHLVTGETMQMTSTSEQRVSMEYYLQKTYYKTASLISNSCKAIALLAGQTAEVSMLAFEYGKNLGLAFQLIDDVLDFTGTSASLGKGSLSDIRHGIITAPILFAIEEFPQLDAVVKRGLDNPADIDLALDYLGKSRGIQRTRELAMKHANLAAEAIDSLPESGDEDVLRSRRALIDLTHRVITRTK

SEQ ID NO: 1690 - protein, 899 aa, Artificial Sequence
  GPPS-GES engineered fusion
MAFNMSRFVTMPSHVLPSSFVAPSLQVSSSPCSWRTRPSPCTSCHLSPSSSSKPLLGSHDYSLLKSLTLSPHAVNSEADSSTRRMKEVKERTWEAFYRAWDSRAAMEMVDTVERLGLSYHFEDEINALLQRFCDWNASEDLFTTALRFRLLRQNGFPTHSDVFGKFMDKNGKFKESLTEDIRGMLSLHEASHLGAKNEEVLAEAKEFTRIHLIQSMPHMEPHFSSHVGRALELPRHLRMVRLEARNYIGEYSRESNPNLAFLELAKLDFDMVQSLHQKELAEILRWWKQLGLVDKLDFARDRPMECFLWTVGIFPDPRHSSCRIELTKAIAILLVIDDIYDSYGSLDELALFTDAVKRWDLGAMDQLPEYMKICYMALYNTTNDIAYRILKEHGWSVIEHLKRTWMDIFGAFLAEAYCFKGGHVPSLEEYLTNAVTTGGTYMALVHAFFLMGQGVTRENMAMLKPYPNIFSCSGKILRLWDDLGTAREEQERGDNASSIECYKREREMDTVLEDEACRKHIRQMIQSLWVELNGELVASSALPLSIIKAAFNLSRTAQVIYQHGDDNKTSSVEDHVQALLFRPVSSNGHAQITMHGGGGSMDFPQQLEACVKQANQALSRFIAPLPFQNTPVVETMQYGALLGGKRLRPFLVYATGHMFGVSTNTLDAPAAAVECIHAYFLIHDDLPAMDDDDLRRGLPTCHVKFGEANAILAGDALQTLAFSILSDADMPEVSDRDRISMISELASASGIAGMCGGQALDLDAEGKHVPLDALERIHRHKTGALIRAAVRLGALSAGDKGRRALPVLDKYAESIGLAFQVQDDILDVVGDTATLGKRQGADQQLGKSTYPALLGLEQARKKARDLIDDARQSLKQLAEQSLDTSALEALADYIIQRNK

SEQ ID NO: 1691 - protein, 952 aa, Artificial Sequence
  GPPS-GES engineered fusion
MAFNMSRFVTMPSHVLPSSFVAPSLQVSSSPCSWRTRPSPCTSCHLSPSSSSKPLLGSHDYSLLKSLTLSPHAVNSEADSSTRRMKEVKERTWEAFYRAWDSRAAMEMVDTVERLGLSYHFEDEINALLQRFCDWNASEDLFTTALRFRLLRQNGFPTHSDVFGKFMDKNGKFKESLTEDIRGMLSLHEASHLGAKNEEVLAEAKEFTRIHLIQSMPHMEPHFSSHVGRALELPRHLRMVRLEARNYIGEYSRESNPNLAFLELAKLDFDMVQSLHQKELAEILRWWKQLGLVDKLDFARDRPMECFLWTVGIFPDPRHSSCRIELTKAIAILLVIDDIYDSYGSLDELALFTDAVKRWDLGAMDQLPEYMKICYMALYNTTNDIAYRILKEHGWSVIEHLKRTWMDIFGAFLAEAYCFKGGHVPSLEEYLTNAVTTGGTYMALVHAFFLMGQGVTRENMAMLKPYPNIFSCSGKILRLWDDLGTAREEQERGDNASSIECYKREREMDTVLEDEACRKHIRQMIQSLWVELNGELVASSALPLSIIKAAFNLSRTAQVIYQHGDDNKTSSVEDHVQALLFRPVSSNGHAQITMHGGGGSMASEKEIRRERFLNVFPKLVEELNASLLAYGMPKEACDWYAHSLNYNTPGGKLNRGLSVVDTYAILSNKTVEQLGQEEYEKVAILGWCIELLQAYWLVADDMMDKSITRRGQPCWYKVPEVGEIAIWDAFMLEAAIYKLLKSHFRNEKYYIDITELFHEVTFQTELGQLMDLITAPEDKVDLSKFSLKKHSFIVTFKTAYYSFYLPVALAMYVAGITDEKDLKQARDVLIPLGEYFQIQDDYLDCFGTPEQIGKIGTDIQDNKCSWVINKALELASAEQRKTLDENYGKKDSVAEAKCKKIFNDLKIEQLYHEYEESIAKDLKAKISQVDESRGFKADVLTAFLNKVYKRSK

SEQ ID NO: 1692 - protein, 919 aa, Artificial Sequence
  GPPS-GES engineered fusion
MAFNMSRFVTMPSHVLPSSFVAPSLQVSSSPCSWRTRPSPCTSCHLSPSSSSKPLLGSHDYSLLKSLTLSPHAVNSEADSSTRRMKEVKERTWEAFYRAWDSRAAMEMVDTVERLGLSYHFEDEINALLQRFCDWNASEDLFTTALRFRLLRQNGFPTHSDVFGKFMDKNGKFKESLTEDIRGMLSLHEASHLGAKNEEVLAEAKEFTRIHLIQSMPHMEPHFSSHVGRALELPRHLRMVRLEARNYIGEYSRESNPNLAFLELAKLDFDMVQSLHQKELAEILRWWKQLGLVDKLDFARDRPMECFLWTVGIFPDPRHSSCRIELTKAIAILLVIDDIYDSYGSLDELALFTDAVKRWDLGAMDQLPEYMKICYMALYNTTNDIAYRILKEHGWSVIEHLKRTWMDIFGAFLAEAYCFKGGHVPSLEEYLTNAVTTGGTYMALVHAFFLMGQGVTRENMAMLKPYPNIFSCSGKILRLWDDLGTAREEQERGDNASSIECYKREREMDTVLEDEACRKHIRQMIQSLWVELNGELVASSALPLSIIKAAFNLSRTAQVIYQHGDDNKTSSVEDHVQALLFRPVSSNGHAQITMHGGGGSMLRCSNTNAQLANLSEQVKGKVTEFDFKEYMRSKAMSVNEALDRAVPLRYPEKIHEAMRYSLLAGGKRVRPILCIAACELVGGSEELAMPTACAMEIIHTMSLIHDDLPCIDNDDLRRGKPTNHKVFGEGTAVLAGDALLSFAFEHIAVSTSKTVESDRVLRVVSELGRAIGSEGVAGGQVADITSQGNPSVGLETLEWIHIHKTAVLLECSVASGAIIGGASDDEIERVRKYARCVGLLFQVVDDILDVTKSSEELGKTAAKDLLSDKATYPKLMGLEKAKEFADELLGKAKEELSFFNPTKAAPLLGLADYIAQRQN

SEQ ID NO: 1693 - protein, 971 aa, Artificial Sequence
  GPPS-GES engineered fusion
MAFNMSRFVTMPSHVLPSSFVAPSLQVSSSPCSWRTRPSPCTSCHLSPSSSSKPLLGSHDYSLLKSLTLSPHAVNSEADSSTRRMKEVKERTWEAFYRAWDSRAAMEMVDTVERLGLSYHFEDEINALLQRFCDWNASEDLFTTALRFRLLRQNGFPTHSDVFGKFMDKNGKFKESLTEDIRGMLSLHEASHLGAKNEEVLAEAKEFTRIHLIQSMPHMEPHFSSHVGRALELPRHLRMVRLEARNYIGEYSRESNPNLAFLELAKLDFDMVQSLHQKELAEILRWWKQLGLVDKLDFARDRPMECFLWTVGIFPDPRHSSCRIELTKAIAILLVIDDIYDSYGSLDELALFTDAVKRWDLGAMDQLPEYMKICYMALYNTTNDIAYRILKEHGWSVIEHLKRTWMDIFGAFLAEAYCFKGGHVPSLEEYLTNAVTTGGTYMALVHAFFLMGQGVTRENMAMLKPYPNIFSCSGKILRLWDDLGTAREEQERGDNASSIECYKREREMDTVLEDEACRKHIRQMIQSLWVELNGELVASSALPLSIIKAAFNLSRTAQVIYQHGDDNKTSSVEDHVQALLFRPVSSNGHAQITMHGGGGSMKDVSLSSFDAHDLDLDKFPEVVRDRLTQFLDAQELTIADIGAPVTDAVAHLRSFVLNGGKRIRPLYAWAGFLAAQGHKNSSEKLESVLDAAASLEFIQACALIHDDIIDSSDTRRGAPTVHRAVEADHRANNFEGDPEHFGVSVSILAGDMALVWAEDMLQDSGLSAEALARTRDAWRGMRTEVIGGQLLDIYLESHANESVELADSVNRFKTAAYTIARPLHLGASIAGGSPQLIDALLHYGHDIGIAFQLRDDLLGVFGDPAITGKPAGDDIREGKRTVLLALALQRADKQSPEAATAIRAGVGKVTSPEDIAVITEHIRATGAEEEVEQRISQLTESGLAHLDDVDIPDEVRAQLRALAIRSTERRM

SEQ ID NO: 1694 - protein, 947 aa, Artificial Sequence
  GPPS-GES engineered fusion
MAFNMSRFVTMPSHVLPSSFVAPSLQVSSSPCSWRTRPSPCTSCHLSPSSSSKPLLGSHDYSLLKSLTLSPHAVNSEADSSTRRMKEVKERTWEAFYRAWDSRAAMEMVDTVERLGLSYHFEDEINALLQRFCDWNASEDLFTTALRFRLLRQNGFPTHSDVFGKFMDKNGKFKESLTEDIRGMLSLHEASHLGAKNEEVLAEAKEFTRIHLIQSMPHMEPHFSSHVGRALELPRHLRMVRLEARNYIGEYSRESNPNLAFLELAKLDFDMVQSLHQKELAEILRWWKQLGLVDKLDFARDRPMECFLWTVGIFPDPRHSSCRIELTKAIAILLVIDDIYDSYGSLDELALFTDAVKRWDLGAMDQLPEYMKICYMALYNTTNDIAYRILKEHGWSVIEHLKRTWMDIFGAFLAEAYCFKGGHVPSLEEYLTNAVTTGGTYMALVHAFFLMGQGVTRENMAMLKPYPNIFSCSGKILRLWDDLGTAREEQERGDNASSIECYKREREMDTVLEDEACRKHIRQMIQSLWVELNGELVASSALPLSIIKAAFNLSRTAQVIYQHGDDNKTSSVEDHVQALLFRPVSSNGHAQITMHGGGGSMLAEEQLDPFSLVADELSLLADRLRSMVVAEVPKLASAAEYFFKMGVEGKRFRPTVLLLMATALNVPLPRPALAEVPETLSTELRTRQQCIAEITEMIHVASLLHDDVLDDAETRRGIGSLNIMMGNKVAVLAGDFLLSRACVALASLKNTEVVSLLATVVEHLVTGETMQMTSTSEQRVSMEYYLQKTYYKTASLISNSCKAIALLAGQTAEVSMLAFEYGKNLGLAFQLIDDVLDFTGTSASLGKGSLSDIRHGIITAPILFAIEEFPQLDAVVKRGLDNPADIDLALDYLGKSRGIQRTRELAMKHANLAAEAIDSLPESGDEDVLRSRRALIDLTHRVITRTK

SEQ ID NO: 1695 - protein, 391 aa, Phialophora attae
MAGGKKALIFGASGVTGWSFVNEILNDYPDKGIWDRVYALTNRPLTRSASKWPDDPRLRIVSGIDLLKGSQEDLEGELRSNVEDIEQITHVYYLAYKASKDVDQELKDAVAMFQRSTIALDKLSPALEFVVLQTGAKMYGCHLLDNHPTDYMSVPHKESTPRLKAPYHDQLFYHPQLDWVTEYARGKKWNWCDTRPDIIIGFVPNQNFYSLATSLAVFLSLYREVEGAGAECMFPGTSKSWVAKSNDSSSDMIARQTLHLSLTLPMDRKGEGFNVADARHPETFESKWPQICAYFGLKGIGPAKEPSNIRTYIREHFDTWRAIEKKHGLQSGIADSDLTFEGFEYFLLAQFDFDRQYDMTKMYDTGFTEERTVMEAWGGVFDRMRAAKLIP

SEQ ID NO: 1696 - protein, 390 aa, Tarenaya spinosa
MCGWWGAGAIGAAKKKLEEDEPPPRSYQSVGLIIGVTGIVGNSLAEILPLSDTPGGPWKVYGVARRPQPSWNADHPIDYIQCDVSDTDDVRCKLSPLTDVTHIFFVAWTNRGSEPENCETNAGMLRNVLRAIVPHAPNLRHVCSADWWRSITSDLRQPRRVLPRSAIHGGSTKVTDSELLLHPGGCPVRGGREERRLDLVCTPTEHDLWVLALQSDEYGGYSLCIRSNLQARGISIAIPRKQDCVGRIRGFFGCGFDSRAADLGSGDPYAGNEAFNCSNGDVFKWKHMWKVLAEQFGIEEFGFEEGKNVGLGKMMEGKERVWEEIVKENQLKKTKMEEVGVWWFADVILGVEGMIDSMNKSKEHGFLGFRNSKNSFISWIDKYKAYKIVP

SEQ ID NO: 1697 - protein, 282 aa, Trifolium pratense
MKKLIAKVRKKVAEHTSISLESSKENETTEPNGGTENKYPTMDEIWYINVVRRGDQSQSPFRSQSESQSGTQTLLCDLDEKKPKKKNKTSFHLSHIIAFELVCSQTSSHIWILTLQFDEYVVGTLCVYAAICKHGGVPLIFPGTKGAWENYYMASDADLIAEQHIWVAVDPYAKNEAFNCSNGDVFMWKQLWKVLAEQFGIEEYGYEEGSSLKLAELMKDKGPVWDEIVKVNELQPTKLEEVGEWWITDASFGLENIVDSMNKAKEHGFLGSEIVRILSLDR

SEQ ID NO: 1698 - protein, 337 aa, Oryza glumipatula
MLPMSMSWWWAGAIGAARKRHDGGGGEQQPPFRSVALVVGSTGIVGTSLVDILPLPDTPGGPWKVYALSRRPPPPWSPPPPAAVTHLCVDLADAAAVAEALAPLTDITHVFYVALAAPHLAEARSREANAGMLRNVLAAVVPTCPALAHVALQTGSKHYIGPPESIGKLAVETPFSEDMPRHDYPNFYYDQEDVLFDAVTSSSSSSSRRAAAVTCSGLGNSGTAACGTSGFGSSGTTGCGGSSCLGNSGTTAGCGGSSCLGNSGTTGCGGSSCLGSSGTAGCGGYSSSSHRAALLMELHESSSSAARKRTEEDMAFLLETMLVGELHSIGCSTCFDV

SEQ ID NO: 1699 - protein, 394 aa, Triticum aestivum
MMKWWWAGAFGAFKKRRASSRARAAAEAPQSNVALVVGSTGIVGAALIDILPLRDTPGGPWKVYALSRRPLPPWSAPLPPDVFHHHLDLADPAAVADALAPLTDVTHVFYVAWDPRPTHAEGREANGAMLRNVLSALVPNCPGLLHVCLQTGRKHYVDPFEPLTDVPLALRPYSEDLPRLDYPDLEDVLLDGLASNNRVTWSVHRPTTIFGFSPRSARNVVASLCVYAAICGKEGLVLRWPGSRVAWEGFSDASDAELVAEHALWAAMEPNGRNEPFNCSNGDLFKWQQLWPILASQFGVKWTGYQGEDQRFMLEEAMAGKEGVWSEIVNENGLVETELNDITNWFCVDAMVNVERENLDTMNKSKEYGFFGFRNTVRSFNTWINKMKVDKIVP

SEQ ID NO: 1700 - protein, 414 aa, Oryza glumipatula
MNDMSWWWAGAIGGVRKRHGEHAGDASRPFQSVALVVGSTVIVGTSLVDILPLPDTPGGPWKVYAVSRRPLPPWSPPPSPAVTHLCVDLADPAAVSAALAPLTDITHVFYVAWAPHFVEEDQNREANSRMLRNVLSAVVPNCPALVHVSVQTGSKHYIGPPESIGKFTIETPFSEDMPRLDNCPNLYYDQEDALFDAVSRSRRRGAAVISWSVHRPSLVFGFSPRSAMNVVCTLCVYAAICRKEGGRKLRWPGSLGAWEGFSNASDADLVAEQHIWAAVDPAARNEAYNYSNGDVYKWKQLWPVLAGRFGMEWSGYEGEESRVSLTEAMAGKEAAWAEIVREEGLVAAAELDQVANWWFVDALFMDKWEFLDTMNKSKEHGFLGFRNTVKSFGTWIDKLRLYKIVPSCRIVSSL

SEQ ID NO: 1701 - protein, 401 aa, Madurella mycetomatis
MPSAVVVGATGILGREIVKRLAHRPDEWKTVYALSRSKKDEYPPNVTHNHVDLVRSADQMAQQLKGIEAEYVFFAAYLQKNTEEENWQINGDMLDNFLKALEITGAVNKIKRILLVTGCKQYGVHLGQAKNPMVETDSWLRDDPFPPNFYYRQQDILKSFCEKHQAISWVVTYPNDVIGFANGNFMNLAEGLGIYAVVSKELGQDLVFPGSETFYSRFDSFTSSKLHAEFCEWAIREPRAANQAFNVVNGDVQTWQDLWPRLARRFGLKVKADQFAGDTGLSSKTRLGAQPPISVFAEEAGLAGRIPPSELEQRISLVKWSQQENVQKAWRRLAEREKLQEDALEKGTWAFIDFVLGRNYDIVVSMSKAREAGWTGYQDTWKSLSDVFGELEAASVLPKIH

SEQ ID NO: 1702 - protein, 244 aa, Phaedon cochleariae
MQPYTFPDDFVFCDLESPDLSTCLRDKLQNWTTMLGTRGINHPIRFTLEPMVIDFWVLNMNLNFLNSTEYLWNCTFSQFWNSTVISASYNPENYTLVYTSYYPHIIEHGRYQMFGTVSFEDGSVDAIYGNGPYDKHIYGLNLTHKITFVPVLREHGVEYLQVSRYELDSDGFRDTSLQWHNLYNGDTIRGNRTVTRLAHNAMALGGALAKPFTDMTIAMFRLYTENLISSVPRRQLRRHFSRHP

SEQ ID NO: 1703 - protein, 372 aa, Glycine max
MSKLNEAPQSVALVLGVTGIVGNSLAQILPLSNTRGGPWKVYGVARRTQPSWNALNTVHYIQCDISDQNDAESKLSSLTDVTHVFYVCWARRPTEAQNCQVNGAMLRNVLRAVIPNAPNLRHVSLQTGTKHYLGPFELLGKIEVAHDPPFTEDLPRLDAPNFYYTQEDILFEEVRKKGLTLTWFVNRPHFIFGFSPYSLMNLVGTLCVYAAICKHEGVPLWFPGTKAVWECYNTASDADLIAEQHIWGAVDPRAKNEAFNCSNGDVFKWKHVWKVLAERFGIREYGFLEGEDLRLSEMMKEKGAEEIVKKNGLQRTKLEDVGDWWFADLILRMEAVLDSMNKAREHGFFGFRDSKKSFMNWIDKTKACKIVP

SEQ ID NO: 1704 - protein, 463 aa, Triticum aestivum
MSLSGHNDVLLCRETAARSSPSVAAFSLSQQEGRTRSLLLPPTAGRSTQAPLTVTVTAATPPSSRDELVVGGRGRRRQETPGRQRRRSRARLLERRPRRRIHGHRRHIAPRHPPAPRHPRRALEGVRAVSRRALPPWTPPPTPAVTHLRVDLADPAAVAEALAPLTDITHVFYAAWSSHRTEAENREANAAMLRNVLSVVVPGCPALAHVCLQTGRKHYVAPFESIGKIPGVPDPPYTEDMPRLDCPNFYYDQEDVLFDEVSRRDGAVSWSVHRPTLIFGFSPRSAMNVVGSLCVYAAICCKEGATPRWPGSRVAWEGFTDASDADLVAEHEIWAAVDPFTKNEAFNCSNGDVFKWKQLWPMLADHFGLEWAGYEGEDGRFIIADAMARKEAVWAEIVQENELVTTELKEITNWWFVDAVLNFEVEHLDSMNKSKEHGFLGFRNTANSFNAWIGKLKASKIVP

SEQ ID NO: 1705 - protein, 389 aa, Olea europaea
MSWWSTRAIGAAKKKFEEDEAPIKHQSVALVIGVTGIVGNSLAEILPLADTPGGPWKVYGVARRPQPSWSEDNPIQYIRCDISDHEDAQAKLSPLTDVTHIFYVTWTNKSTEAENCEANGKMFKNVLEAVISNCPNLKHICLQTGRKHYVGPFESFGKIKFHDTPFHEDLPRLDCPNFYYTMEDILFEEVEKREGLTWSIHRPGLIFGFSPFSMMNLVGTLCVYAAICKHEGMPLRFPGSEVVWDGYYDCSDADLIAEHQIWAAVDPYARNEAFNISNGDVFKWKHFWRILAEQFGVEYEEFEEGQNLTLLAMMKDKGKVWDEIVRENGLTPTKLEDVGVWWLADTMLSLKCLLDTMNKSKEHGFLGFRNSKNSFISWIDKLKAYKIVP

SEQ ID NO: 1706 - protein, 390 aa, Camptotheca acuminata
MSWWWAGAIGAAKKKFEEDGGPKVFQSVGLIVGVTGIVGNSLAEILPLSDTPGGPWKVYGVARRTRPPWNVDHPVEYIQCDISDADDALAKLSPLTDLTHIFYVTWANRSTELENCESNGTMLRNVLRAVIPNAPNLSHICLQTGTKHYIGPFESFGKVQPHEPPFTEDMPRLDAPNFYYTLEDVLFEEAAKKEGLTWTIHRPQVIFGFSPYSMMNIIGTLCVYAAICKHENTPLKFPGSKTAWNCYSNASDADLIAEHQIWAVVDPYAKNEAFNCSNGDVFKWKHLWKVLAEQFDVDYVECDESEKPVSLEEMMKEKGPVWDEIVKERELVPTKLEEVGMWWFVDVIFAGEAMLDSMNKSKEHGFSGFRNSKNSFISWIDKVKDYKIVP

SEQ ID NO: 1707 - protein, 347 aa, Musa acuminata
MSWWWAGAIGAAKKKTTGDDADAPAARYQSVALVVGATGIVGSSLYDILPLADTPGGPWKLSPLGDVTHIFYAAWCRRSTAAETRATNAAMLRNVLDAVLPAAPNLQHVCLQTGRNHYLGPYGPAGGVVAEVGPRHDPPHDPPFPENTPRLAIPNFYYELEDVLLEELAKKERAVTWSVHRPTTIFGFSPCSLMNLVCSLCVYASICRKEGVPLRWFGSEEAWYGFSDASDADLVAEHQIWAAVDPYAKNEAFNCSNGDVFKWKHLWPDAMKGKEAVWEDIVRENELVPTALDEVGHWWYADAVLGLEFEHLDNMNKSKEHGFLGFRNSVTSFNTWIDKLRAYKVVP

SEQ ID NO: 1708 - protein, 387 aa, Arabidopsis thaliana
MSWWWAGAIGAAKKLDEDEPSQSFESVALIIGVTGIVGNSLAEILPLSDTPGGPWKVYGVARRPRPTWNADHPIDYIQCDVSDAEDTRSKLSPLTDVTHVFYVTWTNRESESENCEANGSMLRNVLQAIIPYAPNLRHVCLQTGTKHYLGPFTNVDGPRHDPPFTEDMPRLQIQNFYYTQEDILFEEIKKIETVTWSIHRPNMIFGFSPYSLMNIVGTLCVYAAICKHEGSPLLFPGSKKAWEGFMTASDADLIAEQQIWAAVDPYAKNEAFNCNNADIFKWKHLWKILAEQFGIEEYGFEEGKNLGLVEMMKGKERVWEEMVKENQLQEKKLEEVGVWWFADVILGVEGMIDSMNKSKEYGFLGFRNSNNSFISWIDKYKAFKIVP

SEQ ID NO: 1709 - protein, 389 aa, Digitalis lanata; identical to SEQ ID NO: 370

SEQ ID NO: 1710 - protein, 263 aa, Musa acuminata
MSWWWAGAIGAARKKLDDDFSAAAPRHQSVALVIGATGIVGSSLIGILPLPDTPGGPWKVYGVSRRSPNPNLSPLSDVTHTGRKHYIGPFESIGKISAHDPPFHEDLPRLNVPNFYYDQEDILFDELSKRDGAVTWSIHRPGTIFGFSPTSLMNIIGTLCVYAAICRKEGAPLKWFGSRTAWDGFSDASDADLIAEHQIWAAVDPYAKNEAFNCSNGDGEEGRFKLEDAMREKDKEHGFLGFRNTLTSFNSWIDKMKAFRIVP

SEQ ID NO: 1711 - protein, 346 aa, Musa acuminata
MSWWWAGAIGAARKKLEDDSSSTVPKYESVAIVIGATGIVGTSLVDILPLADTPGGPWKVYAAPVAADTLRVQHIQCDVLDAADAVAKLSPLTDVTHLFYVAWANRLTEAENRVVNSAMLRNVLSAVVPSAPNLCHVCLQTGRKHYVGPFEAVGKALAHDPPFREDLPRLPVPNFYYDQEDILFDELSKKEGAVTWSIHRPTTIFGFSPTSLMNLIGTLCVYAAICRKEGAPLKWFGSRTTWDGFNDASDADLIAEQQIWAAVDPYAKNEAFNISNGDLFKWKHLWAALADQFGLESVGYEGEASRFKLEDAMRGKEAEHGFLGFRNTVASFNSCIDKMKAFKIVP

SEQ ID NO: 1712 - protein, 396 aa, Anthurium amnicola
MSWWWAGAIGAARKKLEEEEDTGGGPRRYQSVGLVVGVTGIVGNSLAEILPLSDTPGGPWKVYGVARRPRPAWNLADHPVEYIQCDVSDADDARAKLSPLTDVTHLFYVTWSSRPTEAENCEVNARMLRNVLATLIPVCPGLRHVCLQTGRKHYIGPFELVGKIPTADPPYHEDLPRLECPNFYHDLEDVLFETAAKAGSLTWSVHRPGFIFGFSPYSIMNVMGSLCVYAAICKHEGIPLRYPGNRVVWEGYSNASDADLIAEHQIWAAVDPYAKNEAFNCSNGDVFKWKHLWRVLAEQFGLDYVGYEGEEGRFGVAEAMAGKGPVWDAIVKENELSQTRLEEVAQWWFVDLLVNCEDTHLDSMNKSKEHGFLGFRNSVNSFIYWIDKMKAYKIVP

SEQ ID NO: 1713 - protein, 393 aa, Cinchona Ledgeriana
MSWWWAGAVGAARKTLGQDGAPRSKNFQSVALIIGVTGIVGGSLAEILPLSDTPGGPWKVYGVARRPRPSWNLDHPVEYIQCDVLDAGDTRAKLSPLSDITHIFWVTWANRPSEAECIKVNGAMFQNVLNSVVPNAPNLSHICLQTGHKHYIGPFEAFGKIKPHETPFIEDVPRLNAPNFYYTLEDMLFDACNKSKGLLTWSVHRAAVIFGFSPCSMMNLVGSLCVYAAICKDENVPLKFPGTKAAWNCYSVASDADLIAEHQIWSAVDPYAKNEAFNCSNGDVFKWKHLWKVLAEQFEVEYAEFDENEKFVSLAERMKNKGPVWDEIVKKNQLTPTKLEEVATFWFADVIFSGECLLDSMNKSKEHGFLGFRNTSKSLISVIDKMKAYKIVP

SEQ ID NO: 1714 - protein, 429 aa, Triticum aestivum
MSWWWAGAVGAVKKRQDERAAAAEPTFQSVALILGSTGIVGTSLLDILPRDDTPGGPWKVYAVSRRAPPGWSTPPPSPAVTHLQLDLADPAAVRDALTPLTDVTHVFYAAWSSHETEDRNREVNAGMLRNVLSVVVPGCPALAHVCLQTGRKHYVGPFDVIGKIPAPDPPYTEDMPRLDHPNFYYDLEDVLFDHVSGRDGAVTWSVHRPTVIFGFSPRSAMNVVGSLCVYAAICRKEGATLRWPGCKVAWEGFTDASDADLVAEHEIWAAVDPFAKNEAFNCSNGDVFKWKQLWPLLADRFGVEWAGYEGEDSRFALADAMAGKEAVWTEIIQENELVTTELEEITSWWFVDAMLSIDIEHLDNMNKSKEHGFLGFRNTINSFNAWIDKMKASKCYASVFKTEIVSFKTRRTKAKYSQEVNAQKQQTLL

SEQ ID NO: 1715 - protein, 341 aa, Aegilops tauschii
MSWWWAGAVGAVKKSQEERTEPSFQSVALVVGSTGIVGTSLVDILPRHDTPGGPWKAHPTEAQNREANSAMLRNVLSVVVPGCPALAHVCLQTGRKHYIGPYEAIGKIPVPDPPYTEDMPRLDYPNFYYDQEDVLFEEVSRRDGAVSWSVHRPSVVFGFSPRSAMNVVASLCVYAAICRKEGAMLRWPGSRVAWEGFSDASDADLVAEQEIWAAVDPLAKNEAFNCSNGDLYKWKQLWPMVADRFGVEWAGYEGEESRFMLADAMAGKEAVWAEILQENELVTTELQEIANWWFLDAVFNVKCEHLDSMNKSKEHGFLGFRNTAKSFNAWIDKMKVLKIVP

SEQ ID NO: 1716 - protein, 391 aa, Vinca minor
MSWWWAGAVSAARKISDENYEAPKKFQSVALIIGVTGIVGNSLAEILPLSDTPGGPWKVYGVARRPRPAWNSDHPVEYIQCDVYSSEETQSKLSPLTDVTHIFWTTWANRPTEAQCIEVNGSMFQNVIDALLPNAPNLSHICIQTGHKHYIGPFESFGKIKPHDTPFIEDVPRLDVPNFYHTLEDIAFDACNKKEGLTWSVHRPAVIFGFSPNSMMNLIGTLCVYATICKHENVPLTYPGTKAAWNCYSVASDADLIAEHQIWAAVDPYAKNEAFNCSNGDIFKWKHLWKVLSEQFEVEFVEFDENQEYVSLSERMKGKGQVWDEIVKKNQLLPTKLEEVATFWFADVILGFECLLDSMNKSKEHGFLGFRNTEKSLISVVDKMKAHKIVP

SEQ ID NO: 1717 - protein, 391 aa, Cinchona pubescens; identical to SEQ ID NO: 386

SEQ ID NO: 1718 - protein, 393 aa, Ophiorrhiza pumila; identical to SEQ ID NO: 387

SEQ ID NO: 1719 - protein, 390 aa, Swertia japonica
MSWWWKRSVQAQNLPEKNQPNGVAETAGRYESVALVVGVTGIVGSSLAQVLKLPDTPGGPWKVYGVARRPCPAWLAKFHVEYIQCDVSNTEEAKTKLSPLKDVTHIFYVSWIGSEDCETNAVMFKNILYNIIPVAPNLKHISLQTGSKHYFGIFEEGSEDVPHESPYTEDLPRLNIPNFYHDLEDILFEETAKHGLTWCVQRPALIFGFSPCSLMNIVSTLSIYATICKHENKPLVYPGSKASWNCYVDGADADLAAEHHIWAAVDPKARNQVFNVKNGDVFKWKNVWKMLADEFEIEMVGYIEGNEQVSMAELMKDKDGVWDEIVKKHKLEDTKLKEIAAFWFADIAFSCVDLVMSVTKSREFGFLGFRDSMKSFKSCIHKMRDFKFIP

SEQ ID NO: 1720 - protein, 391 aa, Lonicera japonica
MSWWWSGAIGAAKKKFDDDDAPKGFQSVALVIGITGIVGNSLAEILPLSDTPGGPWKVYGVARRPRPSWNADHPVEYIQCDISDTEQTLTKLSPLTDVTHIFWNTWANGGAEAVCCEINGTMLKNVLAAAIPNAPNLRHICLQTGHKHYIGPFESFGKITPHDTPFVEDVPRLNVTNFYYTLEDITAEAAARKNGALTWSVHRPAVIFGFSPYSMMNLVGTICVYAAICKHEKAPFKFPGTKAAWDCYSVASDADLIAEHQIWAAVDPNAKNEGFNCSNGDLFKWKHLWKVLAEQFEVEYVEFDENEAAVSLSERMKEKGPVWEDMVKENGLTPTKLEEVASFWFADVIFSGECMLDSMNKSKEHGFLGFRNTKNSLINVIDKMKAYKIVP

SEQ ID NO: 1721 - protein, 388 aa, Rauwolfia serpentina
MSWWWTRSIGAGKNLREQNKENGVSESYKSVALVVGVTGIVGSSLAEVLKLPDTPGGAWKVYGVARRPCPAWLAKKQIEYVQCDVSNTEETTAKLSPLKDLTHIFYVSWIGSEDCQINATMLRNILDAVIPNAQNLQHVCLQTGIKHYFGIFEEGSEVEPHDSPFTEDLPRLNVPNFYHDLEDILYEETAKNNLTWSVHRPALVFGFSPCSMMNIASTLSVYATICKHENKPLVYPGSKKSWNCSADAVDADLVAEQEIWAAVDPKAKNQVLNCNNGDVFKWKHIWKTLAEQFGLEMVGYVEGKEQVSLAELMKDKDSVWDEIVKKHNLVPARLKDIAAFWFADIAFSSENLLSSVNKSKEHGFLGFRNSMKSFVSCIDKMRDYKFIP

SEQ ID NO: 1722 - protein, 406 aa, Lonicera japonica; identical to SEQ ID NO: 388

SEQ ID NO: 1723 - protein, 414 aa, Oryza sativa
MVSSALPRGEPVTHICVDLADPAAVSAALAPLTDITHVFYVAWAPHFFEEDQNREANSRMLRNVLSAVVPNCPALVHVSLQTGSKHYIGPPESIGKFTIETPFSEDMPRLDNCPNLYYDQEDALFDAVSRSRRRGAAVISWSVHRPFPRVRLLPAERHERGVHPLRVRGHLPQGGRQEAPVAGVARRVGRVQQRVRRGPRRGAAHLGGRRPGGEERGVQLQQRRRLQVEAAVDGARRQVRDGVVGVRGGGEQGEPDGGGIVREEGLVAAAELDQVANWWFVDALFMDKWEFLDTMNKSKEHGFLGFRNTVKSFGTWIDKLRLYKIVPSCRIGEPDGGGIVREEGLVAAAELDQVANWWFVDALFMDKWEFLDTMNKSKEHGFLGFRNTVKSFGTWIDKLRLYKIVPSCRIVSSL

SEQ ID NO: 1724 - protein, 265 aa, Phaedon cochleariae
MWFTNILVVLIVGVALVKSSHAQPYTFPDDFVFCDLESPDLSTCLRDKLQNWTTMLGTRGINHPIRFTLEPMVIDFWVLNMNLNFLNSTEYLWNCTFSQFWNSTVISASYNPENYTLVYTSYYPHIIEHGRYQMFGTVSFEDGSVDAIYGNGPYDKHIYGLNLTHKITFVPVLREHGVEYLQVSRYELDSDGFRDTSLQWHNLYNGDTIRGNRTVTRLAHNAMALGGALAKPFTDMTIAMFRLYTENLISSVPRRQLRRHFSRHP

SEQ ID NO: 1725 - DNA, 1080 bp, Nepeta cataria
atggcgaaaaccccagaaacagagcacccagtgaaggcctttggctatgcggccactgacaattctggcaccttctctccgttcaagttttctcgccgcgctactggtgagcgtgatgtgcagttcaaggtgctgtattgtggtgtttgccattcagatctgcacatggtcaagaatgagtggggtgtcactcactacccgatcgttccggggcatgaaattgtgggcgttgcaactgaagttggtagcaaggttgaaaaggttaaggttggcgacaaagttggtgtcggcgtgattgtgggttcatgccgccagtgtgatcagtgcagcaatgatctggaaaactactgctccaagcaaattctgacctacggtgccccttatctggatggcaccattactcgcggcggctactctgatatcatggtggcagacgagcatttcatcatccgttggcctgaaaacttcccgctggatgctggcgctcctctgctgtgcgctggcatcacaacttacagtccactgcgctactttggcctggacaaacctggcctgcgcgttggtgtcaacggtctgggtgggctgggccacgtagctgtcaaattcgccaaagcttttggtactaaggtcacagttatcagctcatctctgcgcaagaagaaggaagctgttgaaaaactgggtgtagatgagtttctggtcagtactgatccagagcagatgcaggctgcaattggcacactggatggcatcattgacacagtctccgcggaacattcagttgtgtctctgctgagtctgctgaagccacacggccgcctgattgtggttggtgcaccggaaaagccgcatcagctgcctgctttcccgctgatcactggtcgcaagtccatttctgggagtgcaatcggcgggatgaaggagacgcaagaaatgattgatttcgcggccaagcacaacattctgccggatgtggaggtcattccgattgattacattaacacggctatggaacgcctgctgaaatcggatgtgaagtatcgcttcgtgattgatgttgagaaatcactgaaggcttga

SEQ ID NO: 1726 - DNA, 1068 bp, Nepeta cataria
atggcgaaatcagtgaacgccgtcggctgggccgcccgcgacacctccggcctgctgtcccctctgaaattcgcccgcccggccgccggcgaccgcgacgtccagttcaaggtcctgtactgcggcatctgccactccgatctgcacagcatcaagaacgagtggggcaacacccaatacccgatcgtcccgggccacgagatcgtcggcgtcgtcaccgccgtcggcccgaaggccaccaaattcaaggccggcgacaaagtcggcgtcggctgcctggtcaattcctgccgccattgcgaccaatgcgccgccgatctggagaattactgcccgcagctggtccaaacctacaatagcgtcctggccgacggctccgtcacctacggcggctactccgatgtgatgacggcggacgaagacttcgtcatccgctggccggagaatttcccgatggataagggcgccccgctgctgtgcgccggggtgacgacgtacagcccgctgcgctactacgggctggacaagccgggcctgcacatcggcgtcgtcgggctgggcgggctgggccatgtggcggtcaagtttgctaaggccttcgggatgaaggtgacggtgatcagcacctccgccgggaagaagaaggaggcaatcgagacgctgggcgccgacgcgttcctgatcagccgcgacgcgtcggagatgcaggcggcggcggggacgctggacgggatgattgatacggtctcggcccagcatccgctgccgccgctgctgagcctgctgaagccgcacgggaagctgattctggtgggcgcgccggagaagccgtttgagctgccggcattcccgctgctgatggggcgcaagactgtggcggggagtgtgattggcgggctgaaagagacgcaggagatgatcgatttcgcggcaaagcataatctgctgccggaggtggagatgattccgatggactacgtgaacacggcgatggagcgcctggctaaagccgacgtcaagtatcgctttgtgattgatgtggggaatacgctgactaaagccgattga

SEQ ID NO: 1727 - DNA, 1308 bp, Nepeta cataria
atggcattttgccgcagctcactgctgctgcgcaaggccctgggtggcagccgccgtgcggcggccgcggccacgtgctcttccgcctacgcttgcggctggcagtcggagcgcgggcgctggtactccggcggtgaagggacgaccatttcagcgccggggtaccacgtgaacaccgcgccgtcgcacatgacgggggcggtgttttgggataaggataagccgattacttatgaggagtttgagatgccacgcccgaaggccaatgaagttctgatcaaaactaaggcttgtggggcgtgccactcggatctgcacgtgatcaaaggcgacctgaaattcccgtgcccttgcatcctgggccatgagattactggtgaagtggtcgaacatggcccgctgaccgaaactaaatacattgaacgctatccagttgggtctaaagtgattggggctttcattatgccgtgcggcagttgtttctactgctcacgcggtgaagatgacctgtgtgagccttattttgcttataaccgcgcaaaaggcacactgtacgatggtcaaacacgcctgtttctgcgtggcagtggcaaaccggtgcatatgtggagcatgagtggtctggctgagtactgtgtgacgccagtaaacggcctgggtgcgctgccagacacactgccttatgccgaatcttcggtcctgggctgtgcagtttttactgcatatggtgcaatcgctcatgctgctgaggtcaaacctggtaactccgttgccgttatcgggatcggcggcgttggctcaagttgtctgcagattgcaaaggcatttggggcttcagagattatcgcagtggatgttgaagatggcaagctggaaacagctaagacatttggcgctactcatattattaattcacgcaaggaggatgctattgctaagattaaggaactgacagatggtcgcggtgtggacattgctgtggaagccattggggggccaaaaacatttgcacaatgtgtaggcagtgttcgcgcaggcggcaaagctgtgatgattggcctgtcaccgaccggtggtaaaggcgaggtcgaaattacccagctggttcgccgcaaggtaaaagtcattggctcttatggcgggcgcgcaatgacagacctgccaaaactggtagagctggcagagcaaggtacattcaatctggaggctgcagttacacgccgctacaaattcgaagaggtggcacaagcatatcaagacctgcaaaacaagaccatcgttggtcgcggcgttattgaaattatgtaa

SEQ ID NO: 1728 - DNA, 2667 bp, Artificial Sequence
  GPPS-GES engineered fusion
atgggttgcatccgttccaccactcacacctccaccaactacggcatcaactcccgtctgggcctgtcctttccagtgccaatcatctaccgtccagcaggcgcatcccgtaacatctctatctacatgtcctcctccgcagcaccaaacgtgacccaggtggtggttggcgcaaacgatgcactgctgcagtacacccaccaaccaatgctgatcccatccgaagtggatgcagataccgaacgtcgtgattacctgctggaaaaggcacgtcaagaactgtcccgtaccaccaagccaaccgataagctgaagctgatcgatatgatccagcgtcttggcatcggcttctacctggaagatgatatcaacgcaatcctgcgtacccagttctccgtgaacgtgatcgatgaagaagatctgtccgcaaccggcttgcgtttccgtatgctgcgtcagaactcctttccaatctcctccgatatcttcaagcgtttccaggatcagaacgaaaagttcgatgaaaccctgaccaacgataccctgggcgtgatcgaactggtgcgttccatcatccacggcgaaccaaagggcgaagaaatcctggaagaagcaatggaattctctaagacccgtctgaagcgttccctgtcctccttgccagcacagatcaaggcagatgtcggccaggcattggaactgccaactcacttgcgtatggcacgtctggaagcacgtcgtttcattgaacagtacgcaacccagtccgatcacaacccaatcctgttggaattggcaaccctggattacaaccacgtgcagtcccagcaccagatggaactggtggaaatcacccgttggtggaagcagctgggccttgtggatcagctgtccttcgcacgtgatcgtcctctggaatgcttcctgtggaccgtgggcctgctgccagaaccaaagtactcctcctgccgtatcgaattggccaagaccattgcagtgctgctggtgattgatgatatcttcgatacctacggcaagatggatgatctgatcttgttcaccgatgcaatccagcgttgggatctgggtgccatggaatccctgccagaatacatgaagatctgctacatggcactgtacaaccttaccaacgaaatttgctacaaggtgctgaaagaaaacggctggaccgtgctgccttacctgaagtcctcctggatcgacatgatcgaaggcttcatggtcgaagcaaagtggttcaacggtggctgcgcaccaaacttggaagaatacgtggaaaacggcgtgtccaccgcaggctcctacatggccctggtgcacctgttctttctgatcggcgaaggcgtgaccgaacagaacgcacagctgctgatgaagaaaccttatccaaaggcattctcctccgctggccgtatcctgcgtttgtgggatgatttgggcaccgcaaaagaagaacaagaacgaggcgatctggcatcctccatcaacctgttcatgaaagaacgtaacctggcaaccgaagaggaaggccgtgaatgcatcttggaagatatctacggctactggaaggatctgaacggcgaattggtgtcccagaaagaaatgccactggcaatcatcaaggtggcactgaacatggctcgtgcatcccaggtcgtgtacaagcacgaagaagattcctacttctccaacgtggataactacgtgcaggcactgctgttcaccccactgatcatcggcggcggctccatggactttccccaacagctcgaagcctgtgtgaaacaggctaaccaggccctgtccagatttatcgccccccttcccttccagaacactcccgtggtagagactatgcagtacggagccctgctcggcggcaagcgattgcgacccttccttgtgtacgccaccggccatatgttcggcgtttctactaacacgctcgacgccccggctgctgccgtggagtgtattcatgcttacttcctgatccacgatgatctgccagccatggatgacgatgatttgcgtcgaggcctcccgacctgccacgttaagttcggcgaggcaaacgctatcctcgctggcgacgcccttcagacacttgcattctccattctgtcagatgctgatatgcccgaggttagtgatagagatcgtatctcgatgatttctgagctggctagcgcatcgggaattgccggcatgtgcggtggtcaggctcttgatttggatgccgagggcaaacatgtcccgctggacgctttggagaggattcatagacacaagacaggtgctctcatccgcgccgccgtccgactgggcgccttgtccgctggcgacaagggtcgacgagccctcccagtcctcgataagtatgctgaatccattggcttagccttccaggtgcaggacgacattctcgacgtcgtgggcgacacggccaccctcggaaaaagacagggcgctgaccagcaactgggcaagtcgacgtaccccgcgcttctgggcctcgaacaagcccgtaagaaggctagagacctcatcgacgacgcgcgtcagtccctcaagcaactggccgagcagtctttggacactagtgctctcgaagctttggctgactacattatccaacggaacaaa

SEQ ID NO: 1729 - DNA, 2826 bp, Artificial Sequence
  GPPS-GES engineered fusion
atgggttgcatccgttccaccactcacacctccaccaactacggcatcaactcccgtctgggcctgtcctttccagtgccaatcatctaccgtccagcaggcgcatcccgtaacatctctatctacatgtcctcctccgcagcaccaaacgtgacccaggtggtggttggcgcaaacgatgcactgctgcagtacacccaccaaccaatgctgatcccatccgaagtggatgcagataccgaacgtcgtgattacctgctggaaaaggcacgtcaagaactgtcccgtaccaccaagccaaccgataagctgaagctgatcgatatgatccagcgtcttggcatcggcttctacctggaagatgatatcaacgcaatcctgcgtacccagttctccgtgaacgtgatcgatgaagaagatctgtccgcaaccggcttgcgtttccgtatgctgcgtcagaactcctttccaatctcctccgatatcttcaagcgtttccaggatcagaacgaaaagttcgatgaaaccctgaccaacgataccctgggcgtgatcgaactggtgcgttccatcatccacggcgaaccaaagggcgaagaaatcctggaagaagcaatggaattctctaagacccgtctgaagcgttccctgtcctccttgccagcacagatcaaggcagatgtcggccaggcattggaactgccaactcacttgcgtatggcacgtctggaagcacgtcgtttcattgaacagtacgcaacccagtccgatcacaacccaatcctgttggaattggcaaccctggattacaaccacgtgcagtcccagcaccagatggaactggtggaaatcacccgttggtggaagcagctgggccttgtggatcagctgtccttcgcacgtgatcgtcctctggaatgcttcctgtggaccgtgggcctgctgccagaaccaaagtactcctcctgccgtatcgaattggccaagaccattgcagtgctgctggtgattgatgatatcttcgatacctacggcaagatggatgatctgatcttgttcaccgatgcaatccagcgttgggatctgggtgccatggaatccctgccagaatacatgaagatctgctacatggcactgtacaaccttaccaacgaaatttgctacaaggtgctgaaagaaaacggctggaccgtgctgccttacctgaagtcctcctggatcgacatgatcgaaggcttcatggtcgaagcaaagtggttcaacggtggctgcgcaccaaacttggaagaatacgtggaaaacggcgtgtccaccgcaggctcctacatggccctggtgcacctgttctttctgatcggcgaaggcgtgaccgaacagaacgcacagctgctgatgaagaaaccttatccaaaggcattctcctccgctggccgtatcctgcgtttgtgggatgatttgggcaccgcaaaagaagaacaagaacgaggcgatctggcatcctccatcaacctgttcatgaaagaacgtaacctggcaaccgaagaggaaggccgtgaatgcatcttggaagatatctacggctactggaaggatctgaacggcgaattggtgtcccagaaagaaatgccactggcaatcatcaaggtggcactgaacatggctcgtgcatcccaggtcgtgtacaagcacgaagaagattcctacttctccaacgtggataactacgtgcaggcactgctgttcaccccactgatcatcggcggcggctccatggcctctgagaaagagatccgacgggagcggttcctaaatgtgttccccaagttggttgaggagctaaacgcctcgctgctggcgtacggaatgcctaaagaagcttgcgactggtacgctcattccctgaactataatactcctggcggtaagctgaaccggggcctctcggtcgtcgatacttacgccattctgtcgaacaagactgtcgagcagctgggccaggaggagtatgaaaaggtcgcaatccttggatggtgcattgagttgctgcaggcgtattggctggtggctgacgatatgatggacaagagtatcacccgacggggccagccttgttggtacaaggtgccggaagtcggagaaattgcgatttgggacgcttttatgcttgaggcggcgatttacaagctcctcaagtcgcacttcagaaacgagaagtactacattgatatcactgaactctttcacgaagtcacattccagaccgagctgggccagcttatggacctgatcaccgctcccgaggacaaagtcgacctttccaaattttccctcaagaaacactctttcatcgtgacctttaagacagcgtactacagcttttatctgcccgtcgctctcgccatgtacgtggcagggatcaccgacgagaaggatctcaaacaggctcgagatgtgcttatacccctgggagagtacttccagattcaggacgactacctggactgtttcggcacccctgaacagattggcaagatcggaactgacatccaggacaataaatgcagctgggtcattaataaagctttagaactggcctccgccgaacagcggaaaactctggacgagaactacggaaagaaggattccgtcgctgaagctaaatgtaagaagattttcaacgacctgaagatcgagcagctctatcacgagtacgaggagtcaattgccaaagacctcaaggcaaagatctctcaggttgacgagtcccggggttttaaggcggatgttctgaccgctttccttaataaggtatacaagaggagtaaa

SEQ ID NO: 1730 - DNA, 2727 bp, Artificial Sequence
  GPPS-GES engineered fusion
atgggttgcatccgttccaccactcacacctccaccaactacggcatcaactcccgtctgggcctgtcctttccagtgccaatcatctaccgtccagcaggcgcatcccgtaacatctctatctacatgtcctcctccgcagcaccaaacgtgacccaggtggtggttggcgcaaacgatgcactgctgcagtacacccaccaaccaatgctgatcccatccgaagtggatgcagataccgaacgtcgtgattacctgctggaaaaggcacgtcaagaactgtcccgtaccaccaagccaaccgataagctgaagctgatcgatatgatccagcgtcttggcatcggcttctacctggaagatgatatcaacgcaatcctgcgtacccagttctccgtgaacgtgatcgatgaagaagatctgtccgcaaccggcttgcgtttccgtatgctgcgtcagaactcctttccaatctcctccgatatcttcaagcgtttccaggatcagaacgaaaagttcgatgaaaccctgaccaacgataccctgggcgtgatcgaactggtgcgttccatcatccacggcgaaccaaagggcgaagaaatcctggaagaagcaatggaattctctaagacccgtctgaagcgttccctgtcctccttgccagcacagatcaaggcagatgtcggccaggcattggaactgccaactcacttgcgtatggcacgtctggaagcacgtcgtttcattgaacagtacgcaacccagtccgatcacaacccaatcctgttggaattggcaaccctggattacaaccacgtgcagtcccagcaccagatggaactggtggaaatcacccgttggtggaagcagctgggccttgtggatcagctgtccttcgcacgtgatcgtcctctggaatgcttcctgtggaccgtgggcctgctgccagaaccaaagtactcctcctgccgtatcgaattggccaagaccattgcagtgctgctggtgattgatgatatcttcgatacctacggcaagatggatgatctgatcttgttcaccgatgcaatccagcgttgggatctgggtgccatggaatccctgccagaatacatgaagatctgctacatggcactgtacaaccttaccaacgaaatttgctacaaggtgctgaaagaaaacggctggaccgtgctgccttacctgaagtcctcctggatcgacatgatcgaaggcttcatggtcgaagcaaagtggttcaacggtggctgcgcaccaaacttggaagaatacgtggaaaacggcgtgtccaccgcaggctcctacatggccctggtgcacctgttctttctgatcggcgaaggcgtgaccgaacagaacgcacagctgctgatgaagaaaccttatccaaaggcattctcctccgctggccgtatcctgcgtttgtgggatgatttgggcaccgcaaaagaagaacaagaacgaggcgatctggcatcctccatcaacctgttcatgaaagaacgtaacctggcaaccgaagaggaaggccgtgaatgcatcttggaagatatctacggctactggaaggatctgaacggcgaattggtgtcccagaaagaaatgccactggcaatcatcaaggtggcactgaacatggctcgtgcatcccaggtcgtgtacaagcacgaagaagattcctacttctccaacgtggataactacgtgcaggcactgctgttcaccccactgatcatcggcggcggctccatgcttcgctgttctaacacaaatgcccagttggcgaacctctccgaacaagtcaagggcaaggttacagagttcgatttcaaggagtacatgcgatctaaggctatgtctgtgaacgaggccctcgaccgagcggtgcccttgcgctaccccgagaagattcacgaggccatgcgttactccctgctggccggaggtaagagagtgcgacccatcctgtgtatcgccgcatgtgagctggtgggcgggtcagaggagttggccatgcctacagcctgcgccatggagatcattcacacaatgtctcttattcatgatgacctgccttgcatcgataatgacgacttgcggagaggcaagcctactaaccacaaggtcttcggagagggtaccgcggtcctggctggcgacgctctcttgtcgtttgctttcgaacatatagcagtgtccacaagcaagactgtggagtcggaccgcgtcctgcgagtcgtttccgagctcggtcgagcaattggttctgagggtgtcgccggtggtcaggtagcagacattacttctcagggaaacccatctgtcggcctcgagacactggaatggattcacattcataaaacagccgtcctcctggagtgctccgtcgcttccggcgccattattggtggggcttcggacgatgagattgaacgagttcgaaagtacgcccgatgtgttggactcctgtttcaggttgtcgacgacatcctggacgtgactaagagtagcgaagaacttggcaagaccgccgccaaagacttgctcagtgataaagctacttaccccaagctgatgggactcgaaaaggctaaggagtttgctgacgaactcctgggcaaggccaaggaggaattgtccttttttaaccccaccaaggcggcccccttgctcggattggctgattacatcgctcagcgccagaac

SEQ ID NO: 1731 - DNA, 2883 bp, Artificial Sequence
  GPPS-GES engineered fusion
atgggttgcatccgttccaccactcacacctccaccaactacggcatcaactcccgtctgggcctgtcctttccagtgccaatcatctaccgtccagcaggcgcatcccgtaacatctctatctacatgtcctcctccgcagcaccaaacgtgacccaggtggtggttggcgcaaacgatgcactgctgcagtacacccaccaaccaatgctgatcccatccgaagtggatgcagataccgaacgtcgtgattacctgctggaaaaggcacgtcaagaactgtcccgtaccaccaagccaaccgataagctgaagctgatcgatatgatccagcgtcttggcatcggcttctacctggaagatgatatcaacgcaatcctgcgtacccagttctccgtgaacgtgatcgatgaagaagatctgtccgcaaccggcttgcgtttccgtatgctgcgtcagaactcctttccaatctcctccgatatcttcaagcgtttccaggatcagaacgaaaagttcgatgaaaccctgaccaacgataccctgggcgtgatcgaactggtgcgttccatcatccacggcgaaccaaagggcgaagaaatcctggaagaagcaatggaattctctaagacccgtctgaagcgttccctgtcctccttgccagcacagatcaaggcagatgtcggccaggcattggaactgccaactcacttgcgtatggcacgtctggaagcacgtcgtttcattgaacagtacgcaacccagtccgatcacaacccaatcctgttggaattggcaaccctggattacaaccacgtgcagtcccagcaccagatggaactggtggaaatcacccgttggtggaagcagctgggccttgtggatcagctgtccttcgcacgtgatcgtcctctggaatgcttcctgtggaccgtgggcctgctgccagaaccaaagtactcctcctgccgtatcgaattggccaagaccattgcagtgctgctggtgattgatgatatcttcgatacctacggcaagatggatgatctgatcttgttcaccgatgcaatccagcgttgggatctgggtgccatggaatccctgccagaatacatgaagatctgctacatggcactgtacaaccttaccaacgaaatttgctacaaggtgctgaaagaaaacggctggaccgtgctgccttacctgaagtcctcctggatcgacatgatcgaaggcttcatggtcgaagcaaagtggttcaacggtggctgcgcaccaaacttggaagaatacgtggaaaacggcgtgtccaccgcaggctcctacatggccctggtgcacctgttctttctgatcggcgaaggcgtgaccgaacagaacgcacagctgctgatgaagaaaccttatccaaaggcattctcctccgctggccgtatcctgcgtttgtgggatgatttgggcaccgcaaaagaagaacaagaacgaggcgatctggcatcctccatcaacctgttcatgaaagaacgtaacctggcaaccgaagaggaaggccgtgaatgcatcttggaagatatctacggctactggaaggatctgaacggcgaattggtgtcccagaaagaaatgccactggcaatcatcaaggtggcactgaacatggctcgtgcatcccaggtcgtgtacaagcacgaagaagattcctacttctccaacgtggataactacgtgcaggcactgctgttcaccccactgatcatcggcggcggctccatgaaagacgtctcgctgagctcattcgatgcccacgacctcgacttagacaagttccccgaagtcgtccgagacaggctgactcagttcctcgacgcacaagagctaacaattgctgacatcggagcccctgtcactgatgctgttgcccacttgcgctctttcgtgttgaacggaggcaaacgaatcagacccctgtacgcttgggccgggttcctcgccgcgcagggacacaagaactcatccgagaagctggagtcagtgctggacgctgcggcatcgctggagttcattcaggcgtgcgccctgattcatgacgacatcatcgactcgtctgacaccagacgtggtgccccaactgttcatagggcagtggaggctgaccatagagccaacaactttgaaggagatcctgagcactttggcgtttccgtgagcatcttggccggcgatatggccttggtctgggcggaggatatgctccaggatagtggactttccgctgaggctctggcccgaacacgcgatgcctggcgaggtatgcgaaccgaggtaattggtggccagcttctcgatatctacctggagagtcatgccaacgagtccgttgagcttgctgacagcgtgaatcgctttaagacagccgcttacacaatcgcccgtcctctgcacctgggcgcctcgatcgctggtggctcccctcaactgattgacgcccttttgcactacggacacgatatcggcatcgccttccagctgcgagacgacttgctgggcgtttttggcgaccccgccattactggaaagcccgcgggcgacgatattcgtgaaggtaagcgtacagtcctgctagctctagctcttcagcgagctgacaagcagtctcctgaagctgcgaccgcaatcagggctggtgttggcaaggtcacatcccctgaagacatcgctgtgataaccgagcacatccgcgccactggtgccgaagaggaggtggaacagcggatttcacagctgacggagtccggcctcgcccaccttgacgacgttgacattccagacgaggttcgggcccagctgagagccctggcgattcgatccacagagagacgaatg

SEQ ID NO: 1732 - DNA, 2811 bp, Artificial Sequence
  GPPS-GES engineered fusion
atgggttgcatccgttccaccactcacacctccaccaactacggcatcaactcccgtctgggcctgtcctttccagtgccaatcatctaccgtccagcaggcgcatcccgtaacatctctatctacatgtcctcctccgcagcaccaaacgtgacccaggtggtggttggcgcaaacgatgcactgctgcagtacacccaccaaccaatgctgatcccatccgaagtggatgcagataccgaacgtcgtgattacctgctggaaaaggcacgtcaagaactgtcccgtaccaccaagccaaccgataagctgaagctgatcgatatgatccagcgtcttggcatcggcttctacctggaagatgatatcaacgcaatcctgcgtacccagttctccgtgaacgtgatcgatgaagaagatctgtccgcaaccggcttgcgtttccgtatgctgcgtcagaactcctttccaatctcctccgatatcttcaagcgtttccaggatcagaacgaaaagttcgatgaaaccctgaccaacgataccctgggcgtgatcgaactggtgcgttccatcatccacggcgaaccaaagggcgaagaaatcctggaagaagcaatggaattctctaagacccgtctgaagcgttccctgtcctccttgccagcacagatcaaggcagatgtcggccaggcattggaactgccaactcacttgcgtatggcacgtctggaagcacgtcgtttcattgaacagtacgcaacccagtccgatcacaacccaatcctgttggaattggcaaccctggattacaaccacgtgcagtcccagcaccagatggaactggtggaaatcacccgttggtggaagcagctgggccttgtggatcagctgtccttcgcacgtgatcgtcctctggaatgcttcctgtggaccgtgggcctgctgccagaaccaaagtactcctcctgccgtatcgaattggccaagaccattgcagtgctgctggtgattgatgatatcttcgatacctacggcaagatggatgatctgatcttgttcaccgatgcaatccagcgttgggatctgggtgccatggaatccctgccagaatacatgaagatctgctacatggcactgtacaaccttaccaacgaaatttgctacaaggtgctgaaagaaaacggctggaccgtgctgccttacctgaagtcctcctggatcgacatgatcgaaggcttcatggtcgaagcaaagtggttcaacggtggctgcgcaccaaacttggaagaatacgtggaaaacggcgtgtccaccgcaggctcctacatggccctggtgcacctgttctttctgatcggcgaaggcgtgaccgaacagaacgcacagctgctgatgaagaaaccttatccaaaggcattctcctccgctggccgtatcctgcgtttgtgggatgatttgggcaccgcaaaagaagaacaagaacgaggcgatctggcatcctccatcaacctgttcatgaaagaacgtaacctggcaaccgaagaggaaggccgtgaatgcatcttggaagatatctacggctactggaaggatctgaacggcgaattggtgtcccagaaagaaatgccactggcaatcatcaaggtggcactgaacatggctcgtgcatcccaggtcgtgtacaagcacgaagaagattcctacttctccaacgtggataactacgtgcaggcactgctgttcaccccactgatcatcggcggcggctccatgctcgctgaagagcagctggatccctttagcctggtcgctgacgaactctccctactggccgaccggctccgatcgatggtggtggcggaggtccccaaactcgcctcggccgccgagtacttctttaagatgggcgtggaaggtaagcgtttccgaccaacggtgctcctgctaatggccaccgccctgaacgttccccttcccagacccgctctcgcagaagttcccgaaaccctctcgaccgaactgcgaactcggcagcagtgtattgccgagatcaccgagatgatccacgtggcctccctgttgcatgatgatgtattggacgatgccgagactcggcggggcattggctctctgaacattatgatgggaaataaggtcgccgttcttgctggggattttctgctatcgcgtgcctgcgtggccctggcctcccttaagaacaccgaggtcgtgtccctgctcgccaccgttgttgagcatttggtcaccggcgagactatgcagatgacatccacttcggagcagagggtatccatggaatactatctccagaagacatactacaagacagcgtctctcatctccaactcatgtaaggctattgcccttctggccggacagacggctgaagtttctatgctggctttcgagtacggcaagaatcttggcctcgccttccagcttattgacgacgtccttgactttaccggcacgtcagcctctctgggcaaaggctccctgagcgacattcgacatggcatcatcacggcaccaattctgttcgccattgaggaatttcctcagcttgacgcggtcgtcaagcgaggactggataaccccgctgatatcgacttggctctcgactatctgggaaagtctcgtggtattcagcgaacacgagagctggcaatgaaacatgcaaacctcgccgccgaggcaattgatagcctgcccgagtcgggtgacgaggatgtactacggagccgtcgagccctcattgatcttacccacagggtcatcacccgtaccaag

SEQ ID NO: 1733 - DNA, 1326 bp, Artificial Sequence
  GPPS-GES engineered fusion
atgcaggaagcggttgcaaaagtcgcacagttgatcattatcattgatgatatttacgatgtctacggcaccgtggatgaactcgaactcttcaccaatgcaattgatcgctgggatctggaagccatggaacagctgccagaatacatgaagacgtgttttctggcgctgtacaactctattaacgagatcggatacgaaatcctcaaggaggagggacgaaacgtgattccgtatctgcgtaatacttggaccgagctctgcaaagcattcctggttgaagctaagtggtactcctccggctatacccccacactcgaggaatatctccagacctcctggatcagcattggctcgctgccgatgcagacctacgtgttcgccttgctgggaaaaaacttggcacctgaaagcagcggcggcggctccatggactttccccaacagctcgaagcctgtgtgaaacaggctaaccaggccctgtccagatttatcgccccccttcccttccagaacactcccgtggtagagactatgcagtacggagccctgctcggcggcaagcgattgcgacccttccttgtgtacgccaccggccatatgttcggcgtttctactaacacgctcgacgccccggctgctgccgtggagtgtattcatgcttacttcctgatccacgatgatctgccagccatggatgacgatgatttgcgtcgaggcctcccgacctgccacgttaagttcggcgaggcaaacgctatcctcgctggcgacgcccttcagacacttgcattctccattctgtcagatgctgatatgcccgaggttagtgatagagatcgtatctcgatgatttctgagctggctagcgcatcgggaattgccggcatgtgcggtggtcaggctcttgatttggatgccgagggcaaacatgtcccgctggacgctttggagaggattcatagacacaagacaggtgctctcatccgcgccgccgtccgactgggcgccttgtccgctggcgacaagggtcgacgagccctcccagtcctcgataagtatgctgaatccattggcttagccttccaggtgcaggacgacattctcgacgtcgtgggcgacacggccaccctcggaaaaagacagggcgctgaccagcaactgggcaagtcgacgtaccccgcgcttctgggcctcgaacaagcccgtaagaaggctagagacctcatcgacgacgcgcgtcagtccctcaagcaactggccgagcagtctttggacactagtgctctcgaagctttggctgactacattatccaacggaacaaa

SEQ ID NO: 1734 - DNA, 1485 bp, Artificial Sequence
  GPPS-GES engineered fusion
atgcaggaagcggttgcaaaagtcgcacagttgatcattatcattgatgatatttacgatgtctacggcaccgtggatgaactcgaactcttcaccaatgcaattgatcgctgggatctggaagccatggaacagctgccagaatacatgaagacgtgttttctggcgctgtacaactctattaacgagatcggatacgaaatcctcaaggaggagggacgaaacgtgattccgtatctgcgtaatacttggaccgagctctgcaaagcattcctggttgaagctaagtggtactcctccggctatacccccacactcgaggaatatctccagacctcctggatcagcattggctcgctgccgatgcagacctacgtgttcgccttgctgggaaaaaacttggcacctgaaagcagcggcggcggctccatggcctctgagaaagagatccgacgggagcggttcctaaatgtgttccccaagttggttgaggagctaaacgcctcgctgctggcgtacggaatgcctaaagaagcttgcgactggtacgctcattccctgaactataatactcctggcggtaagctgaaccggggcctctcggtcgtcgatacttacgccattctgtcgaacaagactgtcgagcagctgggccaggaggagtatgaaaaggtcgcaatccttggatggtgcattgagttgctgcaggcgtattggctggtggctgacgatatgatggacaagagtatcacccgacggggccagccttgttggtacaaggtgccggaagtcggagaaattgcgatttgggacgcttttatgcttgaggcggcgatttacaagctcctcaagtcgcacttcagaaacgagaagtactacattgatatcactgaactctttcacgaagtcacattccagaccgagctgggccagcttatggacctgatcaccgctcccgaggacaaagtcgacctttccaaattttccctcaagaaacactctttcatcgtgacctttaagacagcgtactacagcttttatctgcccgtcgctctcgccatgtacgtggcagggatcaccgacgagaaggatctcaaacaggctcgagatgtgcttatacccctgggagagtacttccagattcaggacgactacctggactgtttcggcacccctgaacagattggcaagatcggaactgacatccaggacaataaatgcagctgggtcattaataaagctttagaactggcctccgccgaacagcggaaaactctggacgagaactacggaaagaaggattccgtcgctgaagctaaatgtaagaagattttcaacgacctgaagatcgagcagctctatcacgagtacgaggagtcaattgccaaagacctcaaggcaaagatctctcaggttgacgagtcccggggttttaaggcggatgttctgaccgctttccttaataaggtatacaagaggagtaaa

SEQ ID NO: 1735 - DNA, 1386 bp, Artificial Sequence
  GPPS-GES engineered fusion
atgcaggaagcggttgcaaaagtcgcacagttgatcattatcattgatgatatttacgatgtctacggcaccgtggatgaactcgaactcttcaccaatgcaattgatcgctgggatctggaagccatggaacagctgccagaatacatgaagacgtgttttctggcgctgtacaactctattaacgagatcggatacgaaatcctcaaggaggagggacgaaacgtgattccgtatctgcgtaatacttggaccgagctctgcaaagcattcctggttgaagctaagtggtactcctccggctatacccccacactcgaggaatatctccagacctcctggatcagcattggctcgctgccgatgcagacctacgtgttcgccttgctgggaaaaaacttggcacctgaaagcagcggcggcggctccatgcttcgctgttctaacacaaatgcccagttggcgaacctctccgaacaagtcaagggcaaggttacagagttcgatttcaaggagtacatgcgatctaaggctatgtctgtgaacgaggccctcgaccgagcggtgcccttgcgctaccccgagaagattcacgaggccatgcgttactccctgctggccggaggtaagagagtgcgacccatcctgtgtatcgccgcatgtgagctggtgggcgggtcagaggagttggccatgcctacagcctgcgccatggagatcattcacacaatgtctcttattcatgatgacctgccttgcatcgataatgacgacttgcggagaggcaagcctactaaccacaaggtcttcggagagggtaccgcggtcctggctggcgacgctctcttgtcgtttgctttcgaacatatagcagtgtccacaagcaagactgtggagtcggaccgcgtcctgcgagtcgtttccgagctcggtcgagcaattggttctgagggtgtcgccggtggtcaggtagcagacattacttctcagggaaacccatctgtcggcctcgagacactggaatggattcacattcataaaacagccgtcctcctggagtgctccgtcgcttccggcgccattattggtggggcttcggacgatgagattgaacgagttcgaaagtacgcccgatgtgttggactcctgtttcaggttgtcgacgacatcctggacgtgactaagagtagcgaagaacttggcaagaccgccgccaaagacttgctcagtgataaagctacttaccccaagctgatgggactcgaaaaggctaaggagtttgctgacgaactcctgggcaaggccaaggaggaattgtccttttttaaccccaccaaggcggcccccttgctcggattggctgattacatcgctcagcgccagaac

SEQ ID NO: 1736 - DNA, 1542 bp, Artificial Sequence
  GPPS-GES engineered fusion
atgcaggaagcggttgcaaaagtcgcacagttgatcattatcattgatgatatttacgatgtctacggcaccgtggatgaactcgaactcttcaccaatgcaattgatcgctgggatctggaagccatggaacagctgccagaatacatgaagacgtgttttctggcgctgtacaactctattaacgagatcggatacgaaatcctcaaggaggagggacgaaacgtgattccgtatctgcgtaatacttggaccgagctctgcaaagcattcctggttgaagctaagtggtactcctccggctatacccccacactcgaggaatatctccagacctcctggatcagcattggctcgctgccgatgcagacctacgtgttcgccttgctgggaaaaaacttggcacctgaaagcagcggcggcggctccatgaaagacgtctcgctgagctcattcgatgcccacgacctcgacttagacaagttccccgaagtcgtccgagacaggctgactcagttcctcgacgcacaagagctaacaattgctgacatcggagcccctgtcactgatgctgttgcccacttgcgctctttcgtgttgaacggaggcaaacgaatcagacccctgtacgcttgggccgggttcctcgccgcgcagggacacaagaactcatccgagaagctggagtcagtgctggacgctgcggcatcgctggagttcattcaggcgtgcgccctgattcatgacgacatcatcgactcgtctgacaccagacgtggtgccccaactgttcatagggcagtggaggctgaccatagagccaacaactttgaaggagatcctgagcactttggcgtttccgtgagcatcttggccggcgatatggccttggtctgggcggaggatatgctccaggatagtggactttccgctgaggctctggcccgaacacgcgatgcctggcgaggtatgcgaaccgaggtaattggtggccagcttctcgatatctacctggagagtcatgccaacgagtccgttgagcttgctgacagcgtgaatcgctttaagacagccgcttacacaatcgcccgtcctctgcacctgggcgcctcgatcgctggtggctcccctcaactgattgacgcccttttgcactacggacacgatatcggcatcgccttccagctgcgagacgacttgctgggcgtttttggcgaccccgccattactggaaagcccgcgggcgacgatattcgtgaaggtaagcgtacagtcctgctagctctagctcttcagcgagctgacaagcagtctcctgaagctgcgaccgcaatcagggctggtgttggcaaggtcacatcccctgaagacatcgctgtgataaccgagcacatccgcgccactggtgccgaagaggaggtggaacagcggatttcacagctgacggagtccggcctcgcccaccttgacgacgttgacattccagacgaggttcgggcccagctgagagccctggcgattcgatccacagagagacgaatg

SEQ ID NO: 1737 - DNA, 1470 bp, Artificial Sequence
  GPPS-GES engineered fusion
atgcaggaagcggttgcaaaagtcgcacagttgatcattatcattgatgatatttacgatgtctacggcaccgtggatgaactcgaactcttcaccaatgcaattgatcgctgggatctggaagccatggaacagctgccagaatacatgaagacgtgttttctggcgctgtacaactctattaacgagatcggatacgaaatcctcaaggaggagggacgaaacgtgattccgtatctgcgtaatacttggaccgagctctgcaaagcattcctggttgaagctaagtggtactcctccggctatacccccacactcgaggaatatctccagacctcctggatcagcattggctcgctgccgatgcagacctacgtgttcgccttgctgggaaaaaacttggcacctgaaagcagcggcggcggctccatgctcgctgaagagcagctggatccctttagcctggtcgctgacgaactctccctactggccgaccggctccgatcgatggtggtggcggaggtccccaaactcgcctcggccgccgagtacttctttaagatgggcgtggaaggtaagcgtttccgaccaacggtgctcctgctaatggccaccgccctgaacgttccccttcccagacccgctctcgcagaagttcccgaaaccctctcgaccgaactgcgaactcggcagcagtgtattgccgagatcaccgagatgatccacgtggcctccctgttgcatgatgatgtattggacgatgccgagactcggcggggcattggctctctgaacattatgatgggaaataaggtcgccgttcttgctggggattttctgctatcgcgtgcctgcgtggccctggcctcccttaagaacaccgaggtcgtgtccctgctcgccaccgttgttgagcatttggtcaccggcgagactatgcagatgacatccacttcggagcagagggtatccatggaatactatctccagaagacatactacaagacagcgtctctcatctccaactcatgtaaggctattgcccttctggccggacagacggctgaagtttctatgctggctttcgagtacggcaagaatcttggcctcgccttccagcttattgacgacgtccttgactttaccggcacgtcagcctctctgggcaaaggctccctgagcgacattcgacatggcatcatcacggcaccaattctgttcgccattgaggaatttcctcagcttgacgcggtcgtcaagcgaggactggataaccccgctgatatcgacttggctctcgactatctgggaaagtctcgtggtattcagcgaacacgagagctggcaatgaaacatgcaaacctcgccgccgaggcaattgatagcctgcccgagtcgggtgacgaggatgtactacggagccgtcgagccctcattgatcttacccacagggtcatcacccgtaccaag

SEQ ID NO: 1738 - DNA, 2718 bp, Artificial Sequence
  GPPS-GES engineered fusion
atgtcgtccatctcgcagaaggtggtcattggcttgaacaaagcggcagccaacaacaaccttcaaaatctcgaccgccgcggcttcaagactcgctgcgtgagcagctccaaagcagcctcttgtcttcgcgcttcctgctcgctccaactcgacgtgaaaccagttcaggaaggccgtcgttccggcaactaccaaccatcaatttgggactttaattacgtacagagcttgaacacgccatacaaggaagagcgttacctcacccgacacgctgagctgattgtccaagtaaaacctctcctggaaaagaaaatggaaccagcgcagcaactggaacttatcgatgatttgaataaccttggcctgtcctacttctttcaagaccgcattaaacagatcctctccttcatctacgatgaaaaccagtgctttcactccaacatcaacgatcaggcagaaaaacgtgacctgtactttacagctttgggcttccgactcctgcgacagcacggcttcgatgttagccaggaagtgttcgattgcttcaagaatgacaacggttctgacttcaaggcctccctctctgacaataccaagggcctgctccagttgtatgaagcatccttcctcgtccgcgaaggtgaagacactctggaacaagcgcgtcaattcgcaactaagttcctgcgccgcaagcttgatgagatcgacgataatcatctgctgtcttgcattcaccattcactcgagattccgcttcactggcgcatccagcgcctcgaggctcgctggtttctggatgcttacgcaacccgccacgacatgaacccggtgattctggaacttgcaaagctggatttcaacatcatccaagcgacccaccaggaggaactcaaggacgtgtcccgttggtggcagaacacacgacttgcagaaaaactgccatttgtgcgtgaccgtctggtcgaatcctacttttgggctatcgcactcttcgaaccgcatcagtacggctaccagcgccgtgtcgccgcaaagattatcacccttgcaaccagcatcgatgacgtatacgatatctacggcaccttggacgaactgcaactgttcaccgataacttccgccgctgggacaccgaatcgttgggccgcttgccttattccatgcaactgttctatatggtgatccataactttgtatcagaattggcatacgagattctcaaagaaaaaggcttcatcgtcatcccctaccttcaacgctcttgggtcgatttggcggaatccttcttgaaagaagcaaattggtactactcaggctacacgccatcactcgaggagtatatcgataatggctcgattagcatcggcgcagtcgccgttctttcccaggtttacttcaccttggcgaactccattgaaaaaccgaagatcgaatccatgtataagtatcaccatatcctgcgcctcagcggactccttgttcgtctgcacgacgatcttggtacgtcacttttcgaaaaaaaacgtggcgacgtgccgaaagccgtcgagatttgcatgaaggagcgtaacgtgactgaagaggaggctgaggagcacgttaaatatctcatccgcgaagcctggaaagagatgaacaccgcaaccactgctgcaggatgtccattcatggacgagctcaacgttgcagcagcaaacctcggtcgcgcggcacaattcgtgtacttggatggcgatggtcacggagtgcagcactctaaaattcaccagcagatgggcggcctcatgttcgaaccctacgtcggcggcggctccatggactttccccaacagctcgaagcctgtgtgaaacaggctaaccaggccctgtccagatttatcgccccccttcccttccagaacactcccgtggtagagactatgcagtacggagccctgctcggcggcaagcgattgcgacccttccttgtgtacgccaccggccatatgttcggcgtttctactaacacgctcgacgccccggctgctgccgtggagtgtattcatgcttacttcctgatccacgatgatctgccagccatggatgacgatgatttgcgtcgaggcctcccgacctgccacgttaagttcggcgaggcaaacgctatcctcgctggcgacgcccttcagacacttgcattctccattctgtcagatgctgatatgcccgaggttagtgatagagatcgtatctcgatgatttctgagctggctagcgcatcgggaattgccggcatgtgcggtggtcaggctcttgatttggatgccgagggcaaacatgtcccgctggacgctttggagaggattcatagacacaagacaggtgctctcatccgcgccgccgtccgactgggcgccttgtccgctggcgacaagggtcgacgagccctcccagtcctcgataagtatgctgaatccattggcttagccttccaggtgcaggacgacattctcgacgtcgtgggcgacacggccaccctcggaaaaagacagggcgctgaccagcaactgggcaagtcgacgtaccccgcgcttctgggcctcgaacaagcccgtaagaaggctagagacctcatcgacgacgcgcgtcagtccctcaagcaactggccgagcagtctttggacactagtgctctcgaagctttggctgactacattatccaacggaacaaa

SEQ ID NO: 1739 - DNA, 2877 bp, Artificial Sequence
  GPPS-GES engineered fusion
atgtcgtccatctcgcagaaggtggtcattggcttgaacaaagcggcagccaacaacaaccttcaaaatctcgaccgccgcggcttcaagactcgctgcgtgagcagctccaaagcagcctcttgtcttcgcgcttcctgctcgctccaactcgacgtgaaaccagttcaggaaggccgtcgttccggcaactaccaaccatcaatttgggactttaattacgtacagagcttgaacacgccatacaaggaagagcgttacctcacccgacacgctgagctgattgtccaagtaaaacctctcctggaaaagaaaatggaaccagcgcagcaactggaacttatcgatgatttgaataaccttggcctgtcctacttctttcaagaccgcattaaacagatcctctccttcatctacgatgaaaaccagtgctttcactccaacatcaacgatcaggcagaaaaacgtgacctgtactttacagctttgggcttccgactcctgcgacagcacggcttcgatgttagccaggaagtgttcgattgcttcaagaatgacaacggttctgacttcaaggcctccctctctgacaataccaagggcctgctccagttgtatgaagcatccttcctcgtccgcgaaggtgaagacactctggaacaagcgcgtcaattcgcaactaagttcctgcgccgcaagcttgatgagatcgacgataatcatctgctgtcttgcattcaccattcactcgagattccgcttcactggcgcatccagcgcctcgaggctcgctggtttctggatgcttacgcaacccgccacgacatgaacccggtgattctggaacttgcaaagctggatttcaacatcatccaagcgacccaccaggaggaactcaaggacgtgtcccgttggtggcagaacacacgacttgcagaaaaactgccatttgtgcgtgaccgtctggtcgaatcctacttttgggctatcgcactcttcgaaccgcatcagtacggctaccagcgccgtgtcgccgcaaagattatcacccttgcaaccagcatcgatgacgtatacgatatctacggcaccttggacgaactgcaactgttcaccgataacttccgccgctgggacaccgaatcgttgggccgcttgccttattccatgcaactgttctatatggtgatccataactttgtatcagaattggcatacgagattctcaaagaaaaaggcttcatcgtcatcccctaccttcaacgctcttgggtcgatttggcggaatccttcttgaaagaagcaaattggtactactcaggctacacgccatcactcgaggagtatatcgataatggctcgattagcatcggcgcagtcgccgttctttcccaggtttacttcaccttggcgaactccattgaaaaaccgaagatcgaatccatgtataagtatcaccatatcctgcgcctcagcggactccttgttcgtctgcacgacgatcttggtacgtcacttttcgaaaaaaaacgtggcgacgtgccgaaagccgtcgagatttgcatgaaggagcgtaacgtgactgaagaggaggctgaggagcacgttaaatatctcatccgcgaagcctggaaagagatgaacaccgcaaccactgctgcaggatgtccattcatggacgagctcaacgttgcagcagcaaacctcggtcgcgcggcacaattcgtgtacttggatggcgatggtcacggagtgcagcactctaaaattcaccagcagatgggcggcctcatgttcgaaccctacgtcggcggcggctccatggcctctgagaaagagatccgacgggagcggttcctaaatgtgttccccaagttggttgaggagctaaacgcctcgctgctggcgtacggaatgcctaaagaagcttgcgactggtacgctcattccctgaactataatactcctggcggtaagctgaaccggggcctctcggtcgtcgatacttacgccattctgtcgaacaagactgtcgagcagctgggccaggaggagtatgaaaaggtcgcaatccttggatggtgcattgagttgctgcaggcgtattggctggtggctgacgatatgatggacaagagtatcacccgacggggccagccttgttggtacaaggtgccggaagtcggagaaattgcgatttgggacgcttttatgcttgaggcggcgatttacaagctcctcaagtcgcacttcagaaacgagaagtactacattgatatcactgaactctttcacgaagtcacattccagaccgagctgggccagcttatggacctgatcaccgctcccgaggacaaagtcgacctttccaaattttccctcaagaaacactctttcatcgtgacctttaagacagcgtactacagcttttatctgcccgtcgctctcgccatgtacgtggcagggatcaccgacgagaaggatctcaaacaggctcgagatgtgcttatacccctgggagagtacttccagattcaggacgactacctggactgtttcggcacccctgaacagattggcaagatcggaactgacatccaggacaataaatgcagctgggtcattaataaagctttagaactggcctccgccgaacagcggaaaactctggacgagaactacggaaagaaggattccgtcgctgaagctaaatgtaagaagattttcaacgacctgaagatcgagcagctctatcacgagtacgaggagtcaattgccaaagacctcaaggcaaagatctctcaggttgacgagtcccggggttttaaggcggatgttctgaccgctttccttaataaggtatacaagaggagtaaa

SEQ ID NO: 1740 - DNA, 2778 bp, Artificial Sequence
  GPPS-GES engineered fusion
atgtcgtccatctcgcagaaggtggtcattggcttgaacaaagcggcagccaacaacaaccttcaaaatctcgaccgccgcggcttcaagactcgctgcgtgagcagctccaaagcagcctcttgtcttcgcgcttcctgctcgctccaactcgacgtgaaaccagttcaggaaggccgtcgttccggcaactaccaaccatcaatttgggactttaattacgtacagagcttgaacacgccatacaaggaagagcgttacctcacccgacacgctgagctgattgtccaagtaaaacctctcctggaaaagaaaatggaaccagcgcagcaactggaacttatcgatgatttgaataaccttggcctgtcctacttctttcaagaccgcattaaacagatcctctccttcatctacgatgaaaaccagtgctttcactccaacatcaacgatcaggcagaaaaacgtgacctgtactttacagctttgggcttccgactcctgcgacagcacggcttcgatgttagccaggaagtgttcgattgcttcaagaatgacaacggttctgacttcaaggcctccctctctgacaataccaagggcctgctccagttgtatgaagcatccttcctcgtccgcgaaggtgaagacactctggaacaagcgcgtcaattcgcaactaagttcctgcgccgcaagcttgatgagatcgacgataatcatctgctgtcttgcattcaccattcactcgagattccgcttcactggcgcatccagcgcctcgaggctcgctggtttctggatgcttacgcaacccgccacgacatgaacccggtgattctggaacttgcaaagctggatttcaacatcatccaagcgacccaccaggaggaactcaaggacgtgtcccgttggtggcagaacacacgacttgcagaaaaactgccatttgtgcgtgaccgtctggtcgaatcctacttttgggctatcgcactcttcgaaccgcatcagtacggctaccagcgccgtgtcgccgcaaagattatcacccttgcaaccagcatcgatgacgtatacgatatctacggcaccttggacgaactgcaactgttcaccgataacttccgccgctgggacaccgaatcgttgggccgcttgccttattccatgcaactgttctatatggtgatccataactttgtatcagaattggcatacgagattctcaaagaaaaaggcttcatcgtcatcccctaccttcaacgctcttgggtcgatttggcggaatccttcttgaaagaagcaaattggtactactcaggctacacgccatcactcgaggagtatatcgataatggctcgattagcatcggcgcagtcgccgttctttcccaggtttacttcaccttggcgaactccattgaaaaaccgaagatcgaatccatgtataagtatcaccatatcctgcgcctcagcggactccttgttcgtctgcacgacgatcttggtacgtcacttttcgaaaaaaaacgtggcgacgtgccgaaagccgtcgagatttgcatgaaggagcgtaacgtgactgaagaggaggctgaggagcacgttaaatatctcatccgcgaagcctggaaagagatgaacaccgcaaccactgctgcaggatgtccattcatggacgagctcaacgttgcagcagcaaacctcggtcgcgcggcacaattcgtgtacttggatggcgatggtcacggagtgcagcactctaaaattcaccagcagatgggcggcctcatgttcgaaccctacgtcggcggcggctccatgcttcgctgttctaacacaaatgcccagttggcgaacctctccgaacaagtcaagggcaaggttacagagttcgatttcaaggagtacatgcgatctaaggctatgtctgtgaacgaggccctcgaccgagcggtgcccttgcgctaccccgagaagattcacgaggccatgcgttactccctgctggccggaggtaagagagtgcgacccatcctgtgtatcgccgcatgtgagctggtgggcgggtcagaggagttggccatgcctacagcctgcgccatggagatcattcacacaatgtctcttattcatgatgacctgccttgcatcgataatgacgacttgcggagaggcaagcctactaaccacaaggtcttcggagagggtaccgcggtcctggctggcgacgctctcttgtcgtttgctttcgaacatatagcagtgtccacaagcaagactgtggagtcggaccgcgtcctgcgagtcgtttccgagctcggtcgagcaattggttctgagggtgtcgccggtggtcaggtagcagacattacttctcagggaaacccatctgtcggcctcgagacactggaatggattcacattcataaaacagccgtcctcctggagtgctccgtcgcttccggcgccattattggtggggcttcggacgatgagattgaacgagttcgaaagtacgcccgatgtgttggactcctgtttcaggttgtcgacgacatcctggacgtgactaagagtagcgaagaacttggcaagaccgccgccaaagacttgctcagtgataaagctacttaccccaagctgatgggactcgaaaaggctaaggagtttgctgacgaactcctgggcaaggccaaggaggaattgtccttttttaaccccaccaaggcggcccccttgctcggattggctgattacatcgctcagcgccagaac

SEQ ID NO: 1741 - DNA, 2934 bp, Artificial Sequence
  GPPS-GES engineered fusion
atgtcgtccatctcgcagaaggtggtcattggcttgaacaaagcggcagccaacaacaaccttcaaaatctcgaccgccgcggcttcaagactcgctgcgtgagcagctccaaagcagcctcttgtcttcgcgcttcctgctcgctccaactcgacgtgaaaccagttcaggaaggccgtcgttccggcaactaccaaccatcaatttgggactttaattacgtacagagcttgaacacgccatacaaggaagagcgttacctcacccgacacgctgagctgattgtccaagtaaaacctctcctggaaaagaaaatggaaccagcgcagcaactggaacttatcgatgatttgaataaccttggcctgtcctacttctttcaagaccgcattaaacagatcctctccttcatctacgatgaaaaccagtgctttcactccaacatcaacgatcaggcagaaaaacgtgacctgtactttacagctttgggcttccgactcctgcgacagcacggcttcgatgttagccaggaagtgttcgattgcttcaagaatgacaacggttctgacttcaaggcctccctctctgacaataccaagggcctgctccagttgtatgaagcatccttcctcgtccgcgaaggtgaagacactctggaacaagcgcgtcaattcgcaactaagttcctgcgccgcaagcttgatgagatcgacgataatcatctgctgtcttgcattcaccattcactcgagattccgcttcactggcgcatccagcgcctcgaggctcgctggtttctggatgcttacgcaacccgccacgacatgaacccggtgattctggaacttgcaaagctggatttcaacatcatccaagcgacccaccaggaggaactcaaggacgtgtcccgttggtggcagaacacacgacttgcagaaaaactgccatttgtgcgtgaccgtctggtcgaatcctacttttgggctatcgcactcttcgaaccgcatcagtacggctaccagcgccgtgtcgccgcaaagattatcacccttgcaaccagcatcgatgacgtatacgatatctacggcaccttggacgaactgcaactgttcaccgataacttccgccgctgggacaccgaatcgttgggccgcttgccttattccatgcaactgttctatatggtgatccataactttgtatcagaattggcatacgagattctcaaagaaaaaggcttcatcgtcatcccctaccttcaacgctcttgggtcgatttggcggaatccttcttgaaagaagcaaattggtactactcaggctacacgccatcactcgaggagtatatcgataatggctcgattagcatcggcgcagtcgccgttctttcccaggtttacttcaccttggcgaactccattgaaaaaccgaagatcgaatccatgtataagtatcaccatatcctgcgcctcagcggactccttgttcgtctgcacgacgatcttggtacgtcacttttcgaaaaaaaacgtggcgacgtgccgaaagccgtcgagatttgcatgaaggagcgtaacgtgactgaagaggaggctgaggagcacgttaaatatctcatccgcgaagcctggaaagagatgaacaccgcaaccactgctgcaggatgtccattcatggacgagctcaacgttgcagcagcaaacctcggtcgcgcggcacaattcgtgtacttggatggcgatggtcacggagtgcagcactctaaaattcaccagcagatgggcggcctcatgttcgaaccctacgtcggcggcggctccatgaaagacgtctcgctgagctcattcgatgcccacgacctcgacttagacaagttccccgaagtcgtccgagacaggctgactcagttcctcgacgcacaagagctaacaattgctgacatcggagcccctgtcactgatgctgttgcccacttgcgctctttcgtgttgaacggaggcaaacgaatcagacccctgtacgcttgggccgggttcctcgccgcgcagggacacaagaactcatccgagaagctggagtcagtgctggacgctgcggcatcgctggagttcattcaggcgtgcgccctgattcatgacgacatcatcgactcgtctgacaccagacgtggtgccccaactgttcatagggcagtggaggctgaccatagagccaacaactttgaaggagatcctgagcactttggcgtttccgtgagcatcttggccggcgatatggccttggtctgggcggaggatatgctccaggatagtggactttccgctgaggctctggcccgaacacgcgatgcctggcgaggtatgcgaaccgaggtaattggtggccagcttctcgatatctacctggagagtcatgccaacgagtccgttgagcttgctgacagcgtgaatcgctttaagacagccgcttacacaatcgcccgtcctctgcacctgggcgcctcgatcgctggtggctcccctcaactgattgacgcccttttgcactacggacacgatatcggcatcgccttccagctgcgagacgacttgctgggcgtttttggcgaccccgccattactggaaagcccgcgggcgacgatattcgtgaaggtaagcgtacagtcctgctagctctagctcttcagcgagctgacaagcagtctcctgaagctgcgaccgcaatcagggctggtgttggcaaggtcacatcccctgaagacatcgctgtgataaccgagcacatccgcgccactggtgccgaagaggaggtggaacagcggatttcacagctgacggagtccggcctcgcccaccttgacgacgttgacattccagacgaggttcgggcccagctgagagccctggcgattcgatccacagagagacgaatg

SEQ ID NO: 1742 - DNA, 2862 bp, Artificial Sequence
  GPPS-GES engineered fusion
atgtcgtccatctcgcagaaggtggtcattggcttgaacaaagcggcagccaacaacaaccttcaaaatctcgaccgccgcggcttcaagactcgctgcgtgagcagctccaaagcagcctcttgtcttcgcgcttcctgctcgctccaactcgacgtgaaaccagttcaggaaggccgtcgttccggcaactaccaaccatcaatttgggactttaattacgtacagagcttgaacacgccatacaaggaagagcgttacctcacccgacacgctgagctgattgtccaagtaaaacctctcctggaaaagaaaatggaaccagcgcagcaactggaacttatcgatgatttgaataaccttggcctgtcctacttctttcaagaccgcattaaacagatcctctccttcatctacgatgaaaaccagtgctttcactccaacatcaacgatcaggcagaaaaacgtgacctgtactttacagctttgggcttccgactcctgcgacagcacggcttcgatgttagccaggaagtgttcgattgcttcaagaatgacaacggttctgacttcaaggcctccctctctgacaataccaagggcctgctccagttgtatgaagcatccttcctcgtccgcgaaggtgaagacactctggaacaagcgcgtcaattcgcaactaagttcctgcgccgcaagcttgatgagatcgacgataatcatctgctgtcttgcattcaccattcactcgagattccgcttcactggcgcatccagcgcctcgaggctcgctggtttctggatgcttacgcaacccgccacgacatgaacccggtgattctggaacttgcaaagctggatttcaacatcatccaagcgacccaccaggaggaactcaaggacgtgtcccgttggtggcagaacacacgacttgcagaaaaactgccatttgtgcgtgaccgtctggtcgaatcctacttttgggctatcgcactcttcgaaccgcatcagtacggctaccagcgccgtgtcgccgcaaagattatcacccttgcaaccagcatcgatgacgtatacgatatctacggcaccttggacgaactgcaactgttcaccgataacttccgccgctgggacaccgaatcgttgggccgcttgccttattccatgcaactgttctatatggtgatccataactttgtatcagaattggcatacgagattctcaaagaaaaaggcttcatcgtcatcccctaccttcaacgctcttgggtcgatttggcggaatccttcttgaaagaagcaaattggtactactcaggctacacgccatcactcgaggagtatatcgataatggctcgattagcatcggcgcagtcgccgttctttcccaggtttacttcaccttggcgaactccattgaaaaaccgaagatcgaatccatgtataagtatcaccatatcctgcgcctcagcggactccttgttcgtctgcacgacgatcttggtacgtcacttttcgaaaaaaaacgtggcgacgtgccgaaagccgtcgagatttgcatgaaggagcgtaacgtgactgaagaggaggctgaggagcacgttaaatatctcatccgcgaagcctggaaagagatgaacaccgcaaccactgctgcaggatgtccattcatggacgagctcaacgttgcagcagcaaacctcggtcgcgcggcacaattcgtgtacttggatggcgatggtcacggagtgcagcactctaaaattcaccagcagatgggcggcctcatgttcgaaccctacgtcggcggcggctccatgctcgctgaagagcagctggatccctttagcctggtcgctgacgaactctccctactggccgaccggctccgatcgatggtggtggcggaggtccccaaactcgcctcggccgccgagtacttctttaagatgggcgtggaaggtaagcgtttccgaccaacggtgctcctgctaatggccaccgccctgaacgttccccttcccagacccgctctcgcagaagttcccgaaaccctctcgaccgaactgcgaactcggcagcagtgtattgccgagatcaccgagatgatccacgtggcctccctgttgcatgatgatgtattggacgatgccgagactcggcggggcattggctctctgaacattatgatgggaaataaggtcgccgttcttgctggggattttctgctatcgcgtgcctgcgtggccctggcctcccttaagaacaccgaggtcgtgtccctgctcgccaccgttgttgagcatttggtcaccggcgagactatgcagatgacatccacttcggagcagagggtatccatggaatactatctccagaagacatactacaagacagcgtctctcatctccaactcatgtaaggctattgcccttctggccggacagacggctgaagtttctatgctggctttcgagtacggcaagaatcttggcctcgccttccagcttattgacgacgtccttgactttaccggcacgtcagcctctctgggcaaaggctccctgagcgacattcgacatggcatcatcacggcaccaattctgttcgccattgaggaatttcctcagcttgacgcggtcgtcaagcgaggactggataaccccgctgatatcgacttggctctcgactatctgggaaagtctcgtggtattcagcgaacacgagagctggcaatgaaacatgcaaacctcgccgccgaggcaattgatagcctgcccgagtcgggtgacgaggatgtactacggagccgtcgagccctcattgatcttacccacagggtcatcacccgtaccaag

SEQ ID NO: 1743 - DNA, 1467 bp, Artificial Sequence
  GPPS-GES engineered fusion
atggaagaagcgaagtggttcaaccgtggatacatccctaccctggatgaatacttggcaaacggcgttatttccggcggtacttgtatggctttggtccacgcgttctttctgatgggtaaaggagtcatgaaggaaacggaagcaatgatggaaccataccctcgttgctttacatcttccggtaaaatcctccgcctgtgggatgacctcggcacctcccgcgaggaacaggagcgaggcgacgtagcttcctccatcgaatgtctgatgaacgaaaagaacatcgccctcgaagacggagctcgtaaacacgttcgccaactgatcggttccctctggatcgaactcaatggcgaactggtggcacctacgggtctgccgctctctaccatcaaggcatccttcaatctgtcccgcaccgcccaagcaatttaccaacacggtaacgataacacagcgtcatcggtacaagatcatgtgcagtccctgttcttcaacccgatcggcttccaaacccgctccccaaatcatcgtaacgtcacactctccaaccgcggcggcggctccatggactttccccaacagctcgaagcctgtgtgaaacaggctaaccaggccctgtccagatttatcgccccccttcccttccagaacactcccgtggtagagactatgcagtacggagccctgctcggcggcaagcgattgcgacccttccttgtgtacgccaccggccatatgttcggcgtttctactaacacgctcgacgccccggctgctgccgtggagtgtattcatgcttacttcctgatccacgatgatctgccagccatggatgacgatgatttgcgtcgaggcctcccgacctgccacgttaagttcggcgaggcaaacgctatcctcgctggcgacgcccttcagacacttgcattctccattctgtcagatgctgatatgcccgaggttagtgatagagatcgtatctcgatgatttctgagctggctagcgcatcgggaattgccggcatgtgcggtggtcaggctcttgatttggatgccgagggcaaacatgtcccgctggacgctttggagaggattcatagacacaagacaggtgctctcatccgcgccgccgtccgactgggcgccttgtccgctggcgacaagggtcgacgagccctcccagtcctcgataagtatgctgaatccattggcttagccttccaggtgcaggacgacattctcgacgtcgtgggcgacacggccaccctcggaaaaagacagggcgctgaccagcaactgggcaagtcgacgtaccccgcgcttctgggcctcgaacaagcccgtaagaaggctagagacctcatcgacgacgcgcgtcagtccctcaagcaactggccgagcagtctttggacactagtgctctcgaagctttggctgactacattatccaacggaacaaa

SEQ ID NO: 1744 - DNA, 1626 bp, Artificial Sequence
  GPPS-GES engineered fusion
atggaagaagcgaagtggttcaaccgtggatacatccctaccctggatgaatacttggcaaacggcgttatttccggcggtacttgtatggctttggtccacgcgttctttctgatgggtaaaggagtcatgaaggaaacggaagcaatgatggaaccataccctcgttgctttacatcttccggtaaaatcctccgcctgtgggatgacctcggcacctcccgcgaggaacaggagcgaggcgacgtagcttcctccatcgaatgtctgatgaacgaaaagaacatcgccctcgaagacggagctcgtaaacacgttcgccaactgatcggttccctctggatcgaactcaatggcgaactggtggcacctacgggtctgccgctctctaccatcaaggcatccttcaatctgtcccgcaccgcccaagcaatttaccaacacggtaacgataacacagcgtcatcggtacaagatcatgtgcagtccctgttcttcaacccgatcggcttccaaacccgctccccaaatcatcgtaacgtcacactctccaaccgcggcggcggctccatggcctctgagaaagagatccgacgggagcggttcctaaatgtgttccccaagttggttgaggagctaaacgcctcgctgctggcgtacggaatgcctaaagaagcttgcgactggtacgctcattccctgaactataatactcctggcggtaagctgaaccggggcctctcggtcgtcgatacttacgccattctgtcgaacaagactgtcgagcagctgggccaggaggagtatgaaaaggtcgcaatccttggatggtgcattgagttgctgcaggcgtattggctggtggctgacgatatgatggacaagagtatcacccgacggggccagccttgttggtacaaggtgccggaagtcggagaaattgcgatttgggacgcttttatgcttgaggcggcgatttacaagctcctcaagtcgcacttcagaaacgagaagtactacattgatatcactgaactctttcacgaagtcacattccagaccgagctgggccagcttatggacctgatcaccgctcccgaggacaaagtcgacctttccaaattttccctcaagaaacactctttcatcgtgacctttaagacagcgtactacagcttttatctgcccgtcgctctcgccatgtacgtggcagggatcaccgacgagaaggatctcaaacaggctcgagatgtgcttatacccctgggagagtacttccagattcaggacgactacctggactgtttcggcacccctgaacagattggcaagatcggaactgacatccaggacaataaatgcagctgggtcattaataaagctttagaactggcctccgccgaacagcggaaaactctggacgagaactacggaaagaaggattccgtcgctgaagctaaatgtaagaagattttcaacgacctgaagatcgagcagctctatcacgagtacgaggagtcaattgccaaagacctcaaggcaaagatctctcaggttgacgagtcccggggttttaaggcggatgttctgaccgctttccttaataaggtatacaagaggagtaaa

SEQ ID NO: 1745 - DNA, 1527 bp, Artificial Sequence
  GPPS-GES engineered fusion
atggaagaagcgaagtggttcaaccgtggatacatccctaccctggatgaatacttggcaaacggcgttatttccggcggtacttgtatggctttggtccacgcgttctttctgatgggtaaaggagtcatgaaggaaacggaagcaatgatggaaccataccctcgttgctttacatcttccggtaaaatcctccgcctgtgggatgacctcggcacctcccgcgaggaacaggagcgaggcgacgtagcttcctccatcgaatgtctgatgaacgaaaagaacatcgccctcgaagacggagctcgtaaacacgttcgccaactgatcggttccctctggatcgaactcaatggcgaactggtggcacctacgggtctgccgctctctaccatcaaggcatccttcaatctgtcccgcaccgcccaagcaatttaccaacacggtaacgataacacagcgtcatcggtacaagatcatgtgcagtccctgttcttcaacccgatcggcttccaaacccgctccccaaatcatcgtaacgtcacactctccaaccgcggcggcggctccatgcttcgctgttctaacacaaatgcccagttggcgaacctctccgaacaagtcaagggcaaggttacagagttcgatttcaaggagtacatgcgatctaaggctatgtctgtgaacgaggccctcgaccgagcggtgcccttgcgctaccccgagaagattcacgaggccatgcgttactccctgctggccggaggtaagagagtgcgacccatcctgtgtatcgccgcatgtgagctggtgggcgggtcagaggagttggccatgcctacagcctgcgccatggagatcattcacacaatgtctcttattcatgatgacctgccttgcatcgataatgacgacttgcggagaggcaagcctactaaccacaaggtcttcggagagggtaccgcggtcctggctggcgacgctctcttgtcgtttgctttcgaacatatagcagtgtccacaagcaagactgtggagtcggaccgcgtcctgcgagtcgtttccgagctcggtcgagcaattggttctgagggtgtcgccggtggtcaggtagcagacattacttctcagggaaacccatctgtcggcctcgagacactggaatggattcacattcataaaacagccgtcctcctggagtgctccgtcgcttccggcgccattattggtggggcttcggacgatgagattgaacgagttcgaaagtacgcccgatgtgttggactcctgtttcaggttgtcgacgacatcctggacgtgactaagagtagcgaagaacttggcaagaccgccgccaaagacttgctcagtgataaagctacttaccccaagctgatgggactcgaaaaggctaaggagtttgctgacgaactcctgggcaaggccaaggaggaattgtccttttttaaccccaccaaggcggcccccttgctcggattggctgattacatcgctcagcgccagaac

SEQ ID NO: 1746 - DNA, 1683 bp, Artificial Sequence
  GPPS-GES engineered fusion
atggaagaagcgaagtggttcaaccgtggatacatccctaccctggatgaatacttggcaaacggcgttatttccggcggtacttgtatggctttggtccacgcgttctttctgatgggtaaaggagtcatgaaggaaacggaagcaatgatggaaccataccctcgttgctttacatcttccggtaaaatcctccgcctgtgggatgacctcggcacctcccgcgaggaacaggagcgaggcgacgtagcttcctccatcgaatgtctgatgaacgaaaagaacatcgccctcgaagacggagctcgtaaacacgttcgccaactgatcggttccctctggatcgaactcaatggcgaactggtggcacctacgggtctgccgctctctaccatcaaggcatccttcaatctgtcccgcaccgcccaagcaatttaccaacacggtaacgataacacagcgtcatcggtacaagatcatgtgcagtccctgttcttcaacccgatcggcttccaaacccgctccccaaatcatcgtaacgtcacactctccaaccgcggcggcggctccatgaaagacgtctcgctgagctcattcgatgcccacgacctcgacttagacaagttccccgaagtcgtccgagacaggctgactcagttcctcgacgcacaagagctaacaattgctgacatcggagcccctgtcactgatgctgttgcccacttgcgctctttcgtgttgaacggaggcaaacgaatcagacccctgtacgcttgggccgggttcctcgccgcgcagggacacaagaactcatccgagaagctggagtcagtgctggacgctgcggcatcgctggagttcattcaggcgtgcgccctgattcatgacgacatcatcgactcgtctgacaccagacgtggtgccccaactgttcatagggcagtggaggctgaccatagagccaacaactttgaaggagatcctgagcactttggcgtttccgtgagcatcttggccggcgatatggccttggtctgggcggaggatatgctccaggatagtggactttccgctgaggctctggcccgaacacgcgatgcctggcgaggtatgcgaaccgaggtaattggtggccagcttctcgatatctacctggagagtcatgccaacgagtccgttgagcttgctgacagcgtgaatcgctttaagacagccgcttacacaatcgcccgtcctctgcacctgggcgcctcgatcgctggtggctcccctcaactgattgacgcccttttgcactacggacacgatatcggcatcgccttccagctgcgagacgacttgctgggcgtttttggcgaccccgccattactggaaagcccgcgggcgacgatattcgtgaaggtaagcgtacagtcctgctagctctagctcttcagcgagctgacaagcagtctcctgaagctgcgaccgcaatcagggctggtgttggcaaggtcacatcccctgaagacatcgctgtgataaccgagcacatccgcgccactggtgccgaagaggaggtggaacagcggatttcacagctgacggagtccggcctcgcccaccttgacgacgttgacattccagacgaggttcgggcccagctgagagccctggcgattcgatccacagagagacgaatg

SEQ ID NO: 1747 - DNA, 1611 bp, Artificial Sequence
  GPPS-GES engineered fusion
atggaagaagcgaagtggttcaaccgtggatacatccctaccctggatgaatacttggcaaacggcgttatttccggcggtacttgtatggctttggtccacgcgttctttctgatgggtaaaggagtcatgaaggaaacggaagcaatgatggaaccataccctcgttgctttacatcttccggtaaaatcctccgcctgtgggatgacctcggcacctcccgcgaggaacaggagcgaggcgacgtagcttcctccatcgaatgtctgatgaacgaaaagaacatcgccctcgaagacggagctcgtaaacacgttcgccaactgatcggttccctctggatcgaactcaatggcgaactggtggcacctacgggtctgccgctctctaccatcaaggcatccttcaatctgtcccgcaccgcccaagcaatttaccaacacggtaacgataacacagcgtcatcggtacaagatcatgtgcagtccctgttcttcaacccgatcggcttccaaacccgctccccaaatcatcgtaacgtcacactctccaaccgcggcggcggctccatgctcgctgaagagcagctggatccctttagcctggtcgctgacgaactctccctactggccgaccggctccgatcgatggtggtggcggaggtccccaaactcgcctcggccgccgagtacttctttaagatgggcgtggaaggtaagcgtttccgaccaacggtgctcctgctaatggccaccgccctgaacgttccccttcccagacccgctctcgcagaagttcccgaaaccctctcgaccgaactgcgaactcggcagcagtgtattgccgagatcaccgagatgatccacgtggcctccctgttgcatgatgatgtattggacgatgccgagactcggcggggcattggctctctgaacattatgatgggaaataaggtcgccgttcttgctggggattttctgctatcgcgtgcctgcgtggccctggcctcccttaagaacaccgaggtcgtgtccctgctcgccaccgttgttgagcatttggtcaccggcgagactatgcagatgacatccacttcggagcagagggtatccatggaatactatctccagaagacatactacaagacagcgtctctcatctccaactcatgtaaggctattgcccttctggccggacagacggctgaagtttctatgctggctttcgagtacggcaagaatcttggcctcgccttccagcttattgacgacgtccttgactttaccggcacgtcagcctctctgggcaaaggctccctgagcgacattcgacatggcatcatcacggcaccaattctgttcgccattgaggaatttcctcagcttgacgcggtcgtcaagcgaggactggataaccccgctgatatcgacttggctctcgactatctgggaaagtctcgtggtattcagcgaacacgagagctggcaatgaaacatgcaaacctcgccgccgaggcaattgatagcctgcccgagtcgggtgacgaggatgtactacggagccgtcgagccctcattgatcttacccacagggtcatcacccgtaccaag

SEQ ID NO: 1748 - DNA, 2694 bp, Artificial Sequence
  GPPS-GES engineered fusion
atggcattcaacatgtcccgtttcgtgacaatgccctcccacgttttgccatcgtccttcgtggctccttcccttcaggtgtccagctcaccttgttcctggcgtacacgccctagcccatgtacctcatgccacctctccccctccagctcctccaagccactccttggctcccacgactatagcttgctgaaatctcttacactctctcctcacgctgttaactcggaagctgattcgtccacccgccgtatgaaggaagtgaaagaacgcacctgggaggccttctaccgagcctgggactcacgcgccgcaatggaaatggttgatactgtggagcgccttggcttgagctaccacttcgaggacgaaattaacgctttgctgcaacgcttctgcgactggaacgcgtctgaagatcttttcacgaccgcgctgcgcttccgcttgttgcgacagaacggttttccaacacactcggatgttttcggtaagttcatggataagaacggaaagttcaaggagtcattgaccgaagatatccgcggcatgctgtcattgcacgaagccagccacttgggagccaaaaatgaagaagttctcgcggaagccaaagagttcacccgcattcacctcattcagtcgatgccacacatggagccacatttctcctcgcatgtgggccgcgctctggagctgccacgccacttgcgcatggtacgactggaagcgcgcaactatatcggtgagtattcgcgagagagcaacccaaacctggcttttcttgaattggcgaaactggatttcgatatggttcagagcctccaccagaaagagttggcggaaatcctgcgctggtggaagcagctcggtctggtcgataagctggatttcgcacgcgatcgcccaatggaatgttttctctggaccgttggcatctttccggacccacgtcactcttcctgtcgcatcgaactgactaaggccatcgctatcctgcttgtgatcgatgatatctacgatagctatggctcattggacgaattggcactcttcaccgatgccgtcaagcgttgggatctgggcgcgatggaccagcttcccgaatacatgaaaatctgctacatggcactgtacaacacaaccaacgacattgcctaccgcattttgaaggagcacggctggtccgtaatcgagcacttgaaacgaacgtggatggacatcttcggcgcatttctcgccgaagcatactgttttaaaggcggccacgtgccatcccttgaagaatacctcaccaacgccgtaaccaccggcggtacctacatggctctggtccacgcattcttcctgatgggtcagggagtgacgcgagaaaacatggcaatgctcaagccatatccaaatattttctcatgctcaggcaagatcttgcgcctctgggatgatcttggcaccgcgcgcgaagaacaggagcgcggcgacaacgctagctcaatcgaatgttacaaacgcgaacgcgagatggacacagtccttgaggatgaggcgtgccgtaagcacattcgccagatgattcagtctctctgggtagagctcaacggtgaacttgtagcctcgtctgcgctgccactgagcatcatcaaggccgcattcaacctctcacgcaccgcgcaggtgatctaccagcacggcgatgacaacaaaacttcatccgtcgaagaccacgttcaagccctcctcttccgaccagtatcgtccaacggccatgcacagattacaatgcatggcggcggctccatggactttccccaacagctcgaagcctgtgtgaaacaggctaaccaggccctgtccagatttatcgccccccttcccttccagaacactcccgtggtagagactatgcagtacggagccctgctcggcggcaagcgattgcgacccttccttgtgtacgccaccggccatatgttcggcgtttctactaacacgctcgacgccccggctgctgccgtggagtgtattcatgcttacttcctgatccacgatgatctgccagccatggatgacgatgatttgcgtcgaggcctcccgacctgccacgttaagttcggcgaggcaaacgctatcctcgctggcgacgcccttcagacacttgcattctccattctgtcagatgctgatatgcccgaggttagtgatagagatcgtatctcgatgatttctgagctggctagcgcatcgggaattgccggcatgtgcggtggtcaggctcttgatttggatgccgagggcaaacatgtcccgctggacgctttggagaggattcatagacacaagacaggtgctctcatccgcgccgccgtccgactgggcgccttgtccgctggcgacaagggtcgacgagccctcccagtcctcgataagtatgctgaatccattggcttagccttccaggtgcaggacgacattctcgacgtcgtgggcgacacggccaccctcggaaaaagacagggcgctgaccagcaactgggcaagtcgacgtaccccgcgcttctgggcctcgaacaagcccgtaagaaggctagagacctcatcgacgacgcgcgtcagtccctcaagcaactggccgagcagtctttggacactagtgctctcgaagctttggctgactacattatccaacggaacaaa

SEQ ID NO: 1749 - DNA, 2853 bp, Artificial Sequence
  GPPS-GES engineered fusion
atggcattcaacatgtcccgtttcgtgacaatgccctcccacgttttgccatcgtccttcgtggctccttcccttcaggtgtccagctcaccttgttcctggcgtacacgccctagcccatgtacctcatgccacctctccccctccagctcctccaagccactccttggctcccacgactatagcttgctgaaatctcttacactctctcctcacgctgttaactcggaagctgattcgtccacccgccgtatgaaggaagtgaaagaacgcacctgggaggccttctaccgagcctgggactcacgcgccgcaatggaaatggttgatactgtggagcgccttggcttgagctaccacttcgaggacgaaattaacgctttgctgcaacgcttctgcgactggaacgcgtctgaagatcttttcacgaccgcgctgcgcttccgcttgttgcgacagaacggttttccaacacactcggatgttttcggtaagttcatggataagaacggaaagttcaaggagtcattgaccgaagatatccgcggcatgctgtcattgcacgaagccagccacttgggagccaaaaatgaagaagttctcgcggaagccaaagagttcacccgcattcacctcattcagtcgatgccacacatggagccacatttctcctcgcatgtgggccgcgctctggagctgccacgccacttgcgcatggtacgactggaagcgcgcaactatatcggtgagtattcgcgagagagcaacccaaacctggcttttcttgaattggcgaaactggatttcgatatggttcagagcctccaccagaaagagttggcggaaatcctgcgctggtggaagcagctcggtctggtcgataagctggatttcgcacgcgatcgcccaatggaatgttttctctggaccgttggcatctttccggacccacgtcactcttcctgtcgcatcgaactgactaaggccatcgctatcctgcttgtgatcgatgatatctacgatagctatggctcattggacgaattggcactcttcaccgatgccgtcaagcgttgggatctgggcgcgatggaccagcttcccgaatacatgaaaatctgctacatggcactgtacaacacaaccaacgacattgcctaccgcattttgaaggagcacggctggtccgtaatcgagcacttgaaacgaacgtggatggacatcttcggcgcatttctcgccgaagcatactgttttaaaggcggccacgtgccatcccttgaagaatacctcaccaacgccgtaaccaccggcggtacctacatggctctggtccacgcattcttcctgatgggtcagggagtgacgcgagaaaacatggcaatgctcaagccatatccaaatattttctcatgctcaggcaagatcttgcgcctctgggatgatcttggcaccgcgcgcgaagaacaggagcgcggcgacaacgctagctcaatcgaatgttacaaacgcgaacgcgagatggacacagtccttgaggatgaggcgtgccgtaagcacattcgccagatgattcagtctctctgggtagagctcaacggtgaacttgtagcctcgtctgcgctgccactgagcatcatcaaggccgcattcaacctctcacgcaccgcgcaggtgatctaccagcacggcgatgacaacaaaacttcatccgtcgaagaccacgttcaagccctcctcttccgaccagtatcgtccaacggccatgcacagattacaatgcatggcggcggctccatggcctctgagaaagagatccgacgggagcggttcctaaatgtgttccccaagttggttgaggagctaaacgcctcgctgctggcgtacggaatgcctaaagaagcttgcgactggtacgctcattccctgaactataatactcctggcggtaagctgaaccggggcctctcggtcgtcgatacttacgccattctgtcgaacaagactgtcgagcagctgggccaggaggagtatgaaaaggtcgcaatccttggatggtgcattgagttgctgcaggcgtattggctggtggctgacgatatgatggacaagagtatcacccgacggggccagccttgttggtacaaggtgccggaagtcggagaaattgcgatttgggacgcttttatgcttgaggcggcgatttacaagctcctcaagtcgcacttcagaaacgagaagtactacattgatatcactgaactctttcacgaagtcacattccagaccgagctgggccagcttatggacctgatcaccgctcccgaggacaaagtcgacctttccaaattttccctcaagaaacactctttcatcgtgacctttaagacagcgtactacagcttttatctgcccgtcgctctcgccatgtacgtggcagggatcaccgacgagaaggatctcaaacaggctcgagatgtgcttatacccctgggagagtacttccagattcaggacgactacctggactgtttcggcacccctgaacagattggcaagatcggaactgacatccaggacaataaatgcagctgggtcattaataaagctttagaactggcctccgccgaacagcggaaaactctggacgagaactacggaaagaaggattccgtcgctgaagctaaatgtaagaagattttcaacgacctgaagatcgagcagctctatcacgagtacgaggagtcaattgccaaagacctcaaggcaaagatctctcaggttgacgagtcccggggttttaaggcggatgttctgaccgctttccttaataaggtatacaagaggagtaaa

SEQ ID NO: 1750 - DNA, 2754 bp, Artificial Sequence
  GPPS-GES engineered fusion
atggcattcaacatgtcccgtttcgtgacaatgccctcccacgttttgccatcgtccttcgtggctccttcccttcaggtgtccagctcaccttgttcctggcgtacacgccctagcccatgtacctcatgccacctctccccctccagctcctccaagccactccttggctcccacgactatagcttgctgaaatctcttacactctctcctcacgctgttaactcggaagctgattcgtccacccgccgtatgaaggaagtgaaagaacgcacctgggaggccttctaccgagcctgggactcacgcgccgcaatggaaatggttgatactgtggagcgccttggcttgagctaccacttcgaggacgaaattaacgctttgctgcaacgcttctgcgactggaacgcgtctgaagatcttttcacgaccgcgctgcgcttccgcttgttgcgacagaacggttttccaacacactcggatgttttcggtaagttcatggataagaacggaaagttcaaggagtcattgaccgaagatatccgcggcatgctgtcattgcacgaagccagccacttgggagccaaaaatgaagaagttctcgcggaagccaaagagttcacccgcattcacctcattcagtcgatgccacacatggagccacatttctcctcgcatgtgggccgcgctctggagctgccacgccacttgcgcatggtacgactggaagcgcgcaactatatcggtgagtattcgcgagagagcaacccaaacctggcttttcttgaattggcgaaactggatttcgatatggttcagagcctccaccagaaagagttggcggaaatcctgcgctggtggaagcagctcggtctggtcgataagctggatttcgcacgcgatcgcccaatggaatgttttctctggaccgttggcatctttccggacccacgtcactcttcctgtcgcatcgaactgactaaggccatcgctatcctgcttgtgatcgatgatatctacgatagctatggctcattggacgaattggcactcttcaccgatgccgtcaagcgttgggatctgggcgcgatggaccagcttcccgaatacatgaaaatctgctacatggcactgtacaacacaaccaacgacattgcctaccgcattttgaaggagcacggctggtccgtaatcgagcacttgaaacgaacgtggatggacatcttcggcgcatttctcgccgaagcatactgttttaaaggcggccacgtgccatcccttgaagaatacctcaccaacgccgtaaccaccggcggtacctacatggctctggtccacgcattcttcctgatgggtcagggagtgacgcgagaaaacatggcaatgctcaagccatatccaaatattttctcatgctcaggcaagatcttgcgcctctgggatgatcttggcaccgcgcgcgaagaacaggagcgcggcgacaacgctagctcaatcgaatgttacaaacgcgaacgcgagatggacacagtccttgaggatgaggcgtgccgtaagcacattcgccagatgattcagtctctctgggtagagctcaacggtgaacttgtagcctcgtctgcgctgccactgagcatcatcaaggccgcattcaacctctcacgcaccgcgcaggtgatctaccagcacggcgatgacaacaaaacttcatccgtcgaagaccacgttcaagccctcctcttccgaccagtatcgtccaacggccatgcacagattacaatgcatggcggcggctccatgcttcgctgttctaacacaaatgcccagttggcgaacctctccgaacaagtcaagggcaaggttacagagttcgatttcaaggagtacatgcgatctaaggctatgtctgtgaacgaggccctcgaccgagcggtgcccttgcgctaccccgagaagattcacgaggccatgcgttactccctgctggccggaggtaagagagtgcgacccatcctgtgtatcgccgcatgtgagctggtgggcgggtcagaggagttggccatgcctacagcctgcgccatggagatcattcacacaatgtctcttattcatgatgacctgccttgcatcgataatgacgacttgcggagaggcaagcctactaaccacaaggtcttcggagagggtaccgcggtcctggctggcgacgctctcttgtcgtttgctttcgaacatatagcagtgtccacaagcaagactgtggagtcggaccgcgtcctgcgagtcgtttccgagctcggtcgagcaattggttctgagggtgtcgccggtggtcaggtagcagacattacttctcagggaaacccatctgtcggcctcgagacactggaatggattcacattcataaaacagccgtcctcctggagtgctccgtcgcttccggcgccattattggtggggcttcggacgatgagattgaacgagttcgaaagtacgcccgatgtgttggactcctgtttcaggttgtcgacgacatcctggacgtgactaagagtagcgaagaacttggcaagaccgccgccaaagacttgctcagtgataaagctacttaccccaagctgatgggactcgaaaaggctaaggagtttgctgacgaactcctgggcaaggccaaggaggaattgtccttttttaaccccaccaaggcggcccccttgctcggattggctgattacatcgctcagcgccagaac

SEQ ID NO: 1751 - DNA, 2910 bp, Artificial Sequence
  GPPS-GES engineered fusion
atggcattcaacatgtcccgtttcgtgacaatgccctcccacgttttgccatcgtccttcgtggctccttcccttcaggtgtccagctcaccttgttcctggcgtacacgccctagcccatgtacctcatgccacctctccccctccagctcctccaagccactccttggctcccacgactatagcttgctgaaatctcttacactctctcctcacgctgttaactcggaagctgattcgtccacccgccgtatgaaggaagtgaaagaacgcacctgggaggccttctaccgagcctgggactcacgcgccgcaatggaaatggttgatactgtggagcgccttggcttgagctaccacttcgaggacgaaattaacgctttgctgcaacgcttctgcgactggaacgcgtctgaagatcttttcacgaccgcgctgcgcttccgcttgttgcgacagaacggttttccaacacactcggatgttttcggtaagttcatggataagaacggaaagttcaaggagtcattgaccgaagatatccgcggcatgctgtcattgcacgaagccagccacttgggagccaaaaatgaagaagttctcgcggaagccaaagagttcacccgcattcacctcattcagtcgatgccacacatggagccacatttctcctcgcatgtgggccgcgctctggagctgccacgccacttgcgcatggtacgactggaagcgcgcaactatatcggtgagtattcgcgagagagcaacccaaacctggcttttcttgaattggcgaaactggatttcgatatggttcagagcctccaccagaaagagttggcggaaatcctgcgctggtggaagcagctcggtctggtcgataagctggatttcgcacgcgatcgcccaatggaatgttttctctggaccgttggcatctttccggacccacgtcactcttcctgtcgcatcgaactgactaaggccatcgctatcctgcttgtgatcgatgatatctacgatagctatggctcattggacgaattggcactcttcaccgatgccgtcaagcgttgggatctgggcgcgatggaccagcttcccgaatacatgaaaatctgctacatggcactgtacaacacaaccaacgacattgcctaccgcattttgaaggagcacggctggtccgtaatcgagcacttgaaacgaacgtggatggacatcttcggcgcatttctcgccgaagcatactgttttaaaggcggccacgtgccatcccttgaagaatacctcaccaacgccgtaaccaccggcggtacctacatggctctggtccacgcattcttcctgatgggtcagggagtgacgcgagaaaacatggcaatgctcaagccatatccaaatattttctcatgctcaggcaagatcttgcgcctctgggatgatcttggcaccgcgcgcgaagaacaggagcgcggcgacaacgctagctcaatcgaatgttacaaacgcgaacgcgagatggacacagtccttgaggatgaggcgtgccgtaagcacattcgccagatgattcagtctctctgggtagagctcaacggtgaacttgtagcctcgtctgcgctgccactgagcatcatcaaggccgcattcaacctctcacgcaccgcgcaggtgatctaccagcacggcgatgacaacaaaacttcatccgtcgaagaccacgttcaagccctcctcttccgaccagtatcgtccaacggccatgcacagattacaatgcatggcggcggctccatgaaagacgtctcgctgagctcattcgatgcccacgacctcgacttagacaagttccccgaagtcgtccgagacaggctgactcagttcctcgacgcacaagagctaacaattgctgacatcggagcccctgtcactgatgctgttgcccacttgcgctctttcgtgttgaacggaggcaaacgaatcagacccctgtacgcttgggccgggttcctcgccgcgcagggacacaagaactcatccgagaagctggagtcagtgctggacgctgcggcatcgctggagttcattcaggcgtgcgccctgattcatgacgacatcatcgactcgtctgacaccagacgtggtgccccaactgttcatagggcagtggaggctgaccatagagccaacaactttgaaggagatcctgagcactttggcgtttccgtgagcatcttggccggcgatatggccttggtctgggcggaggatatgctccaggatagtggactttccgctgaggctctggcccgaacacgcgatgcctggcgaggtatgcgaaccgaggtaattggtggccagcttctcgatatctacctggagagtcatgccaacgagtccgttgagcttgctgacagcgtgaatcgctttaagacagccgcttacacaatcgcccgtcctctgcacctgggcgcctcgatcgctggtggctcccctcaactgattgacgcccttttgcactacggacacgatatcggcatcgccttccagctgcgagacgacttgctgggcgtttttggcgaccccgccattactggaaagcccgcgggcgacgatattcgtgaaggtaagcgtacagtcctgctagctctagctcttcagcgagctgacaagcagtctcctgaagctgcgaccgcaatcagggctggtgttggcaaggtcacatcccctgaagacatcgctgtgataaccgagcacatccgcgccactggtgccgaagaggaggtggaacagcggatttcacagctgacggagtccggcctcgcccaccttgacgacgttgacattccagacgaggttcgggcccagctgagagccctggcgattcgatccacagagagacgaatg

SEQ ID NO: 1752 - DNA, 2838 bp, Artificial Sequence
  GPPS-GES engineered fusion
atggcattcaacatgtcccgtttcgtgacaatgccctcccacgttttgccatcgtccttcgtggctccttcccttcaggtgtccagctcaccttgttcctggcgtacacgccctagcccatgtacctcatgccacctctccccctccagctcctccaagccactccttggctcccacgactatagcttgctgaaatctcttacactctctcctcacgctgttaactcggaagctgattcgtccacccgccgtatgaaggaagtgaaagaacgcacctgggaggccttctaccgagcctgggactcacgcgccgcaatggaaatggttgatactgtggagcgccttggcttgagctaccacttcgaggacgaaattaacgctttgctgcaacgcttctgcgactggaacgcgtctgaagatcttttcacgaccgcgctgcgcttccgcttgttgcgacagaacggttttccaacacactcggatgttttcggtaagttcatggataagaacggaaagttcaaggagtcattgaccgaagatatccgcggcatgctgtcattgcacgaagccagccacttgggagccaaaaatgaagaagttctcgcggaagccaaagagttcacccgcattcacctcattcagtcgatgccacacatggagccacatttctcctcgcatgtgggccgcgctctggagctgccacgccacttgcgcatggtacgactggaagcgcgcaactatatcggtgagtattcgcgagagagcaacccaaacctggcttttcttgaattggcgaaactggatttcgatatggttcagagcctccaccagaaagagttggcggaaatcctgcgctggtggaagcagctcggtctggtcgataagctggatttcgcacgcgatcgcccaatggaatgttttctctggaccgttggcatctttccggacccacgtcactcttcctgtcgcatcgaactgactaaggccatcgctatcctgcttgtgatcgatgatatctacgatagctatggctcattggacgaattggcactcttcaccgatgccgtcaagcgttgggatctgggcgcgatggaccagcttcccgaatacatgaaaatctgctacatggcactgtacaacacaaccaacgacattgcctaccgcattttgaaggagcacggctggtccgtaatcgagcacttgaaacgaacgtggatggacatcttcggcgcatttctcgccgaagcatactgttttaaaggcggccacgtgccatcccttgaagaatacctcaccaacgccgtaaccaccggcggtacctacatggctctggtccacgcattcttcctgatgggtcagggagtgacgcgagaaaacatggcaatgctcaagccatatccaaatattttctcatgctcaggcaagatcttgcgcctctgggatgatcttggcaccgcgcgcgaagaacaggagcgcggcgacaacgctagctcaatcgaatgttacaaacgcgaacgcgagatggacacagtccttgaggatgaggcgtgccgtaagcacattcgccagatgattcagtctctctgggtagagctcaacggtgaacttgtagcctcgtctgcgctgccactgagcatcatcaaggccgcattcaacctctcacgcaccgcgcaggtgatctaccagcacggcgatgacaacaaaacttcatccgtcgaagaccacgttcaagccctcctcttccgaccagtatcgtccaacggccatgcacagattacaatgcatggcggcggctccatgctcgctgaagagcagctggatccctttagcctggtcgctgacgaactctccctactggccgaccggctccgatcgatggtggtggcggaggtccccaaactcgcctcggccgccgagtacttctttaagatgggcgtggaaggtaagcgtttccgaccaacggtgctcctgctaatggccaccgccctgaacgttccccttcccagacccgctctcgcagaagttcccgaaaccctctcgaccgaactgcgaactcggcagcagtgtattgccgagatcaccgagatgatccacgtggcctccctgttgcatgatgatgtattggacgatgccgagactcggcggggcattggctctctgaacattatgatgggaaataaggtcgccgttcttgctggggattttctgctatcgcgtgcctgcgtggccctggcctcccttaagaacaccgaggtcgtgtccctgctcgccaccgttgttgagcatttggtcaccggcgagactatgcagatgacatccacttcggagcagagggtatccatggaatactatctccagaagacatactacaagacagcgtctctcatctccaactcatgtaaggctattgcccttctggccggacagacggctgaagtttctatgctggctttcgagtacggcaagaatcttggcctcgccttccagcttattgacgacgtccttgactttaccggcacgtcagcctctctgggcaaaggctccctgagcgacattcgacatggcatcatcacggcaccaattctgttcgccattgaggaatttcctcagcttgacgcggtcgtcaagcgaggactggataaccccgctgatatcgacttggctctcgactatctgggaaagtctcgtggtattcagcgaacacgagagctggcaatgaaacatgcaaacctcgccgccgaggcaattgatagcctgcccgagtcgggtgacgaggatgtactacggagccgtcgagccctcattgatcttacccacagggtcatcacccgtaccaag

SEQ ID NO: 1753 - DNA, 2670 bp, Artificial Sequence
  GPPS-GES engineered fusion
atgggttgcatccgttccaccactcacacctccaccaactacggcatcaactcccgtctgggcctgtcctttccagtgccaatcatctaccgtccagcaggcgcatcccgtaacatctctatctacatgtcctcctccgcagcaccaaacgtgacccaggtggtggttggcgcaaacgatgcactgctgcagtacacccaccaaccaatgctgatcccatccgaagtggatgcagataccgaacgtcgtgattacctgctggaaaaggcacgtcaagaactgtcccgtaccaccaagccaaccgataagctgaagctgatcgatatgatccagcgtcttggcatcggcttctacctggaagatgatatcaacgcaatcctgcgtacccagttctccgtgaacgtgatcgatgaagaagatctgtccgcaaccggcttgcgtttccgtatgctgcgtcagaactcctttccaatctcctccgatatcttcaagcgtttccaggatcagaacgaaaagttcgatgaaaccctgaccaacgataccctgggcgtgatcgaactggtgcgttccatcatccacggcgaaccaaagggcgaagaaatcctggaagaagcaatggaattctctaagacccgtctgaagcgttccctgtcctccttgccagcacagatcaaggcagatgtcggccaggcattggaactgccaactcacttgcgtatggcacgtctggaagcacgtcgtttcattgaacagtacgcaacccagtccgatcacaacccaatcctgttggaattggcaaccctggattacaaccacgtgcagtcccagcaccagatggaactggtggaaatcacccgttggtggaagcagctgggccttgtggatcagctgtccttcgcacgtgatcgtcctctggaatgcttcctgtggaccgtgggcctgctgccagaaccaaagtactcctcctgccgtatcgaattggccaagaccattgcagtgctgctggtgattgatgatatcttcgatacctacggcaagatggatgatctgatcttgttcaccgatgcaatccagcgttgggatctgggtgccatggaatccctgccagaatacatgaagatctgctacatggcactgtacaaccttaccaacgaaatttgctacaaggtgctgaaagaaaacggctggaccgtgctgccttacctgaagtcctcctggatcgacatgatcgaaggcttcatggtcgaagcaaagtggttcaacggtggctgcgcaccaaacttggaagaatacgtggaaaacggcgtgtccaccgcaggctcctacatggccctggtgcacctgttctttctgatcggcgaaggcgtgaccgaacagaacgcacagctgctgatgaagaaaccttatccaaaggcattctcctccgctggccgtatcctgcgtttgtgggatgatttgggcaccgcaaaagaagaacaagaacgaggcgatctggcatcctccatcaacctgttcatgaaagaacgtaacctggcaaccgaagaggaaggccgtgaatgcatcttggaagatatctacggctactggaaggatctgaacggcgaattggtgtcccagaaagaaatgccactggcaatcatcaaggtggcactgaacatggctcgtgcatcccaggtcgtgtacaagcacgaagaagattcctacttctccaacgtggataactacgtgcaggcactgctgttcaccccactgatcatcggcggcggcggctccatggactttccccaacagctcgaagcctgtgtgaaacaggctaaccaggccctgtccagatttatcgccccccttcccttccagaacactcccgtggtagagactatgcagtacggagccctgctcggcggcaagcgattgcgacccttccttgtgtacgccaccggccatatgttcggcgtttctactaacacgctcgacgccccggctgctgccgtggagtgtattcatgcttacttcctgatccacgatgatctgccagccatggatgacgatgatttgcgtcgaggcctcccgacctgccacgttaagttcggcgaggcaaacgctatcctcgctggcgacgcccttcagacacttgcattctccattctgtcagatgctgatatgcccgaggttagtgatagagatcgtatctcgatgatttctgagctggctagcgcatcgggaattgccggcatgtgcggtggtcaggctcttgatttggatgccgagggcaaacatgtcccgctggacgctttggagaggattcatagacacaagacaggtgctctcatccgcgccgccgtccgactgggcgccttgtccgctggcgacaagggtcgacgagccctcccagtcctcgataagtatgctgaatccattggcttagccttccaggtgcaggacgacattctcgacgtcgtgggcgacacggccaccctcggaaaaagacagggcgctgaccagcaactgggcaagtcgacgtaccccgcgcttctgggcctcgaacaagcccgtaagaaggctagagacctcatcgacgacgcgcgtcagtccctcaagcaactggccgagcagtctttggacactagtgctctcgaagctttggctgactacattatccaacggaacaaa

SEQ ID NO: 1754 - DNA, 2829 bp, Artificial Sequence
  GPPS-GES engineered fusion
atgggttgcatccgttccaccactcacacctccaccaactacggcatcaactcccgtctgggcctgtcctttccagtgccaatcatctaccgtccagcaggcgcatcccgtaacatctctatctacatgtcctcctccgcagcaccaaacgtgacccaggtggtggttggcgcaaacgatgcactgctgcagtacacccaccaaccaatgctgatcccatccgaagtggatgcagataccgaacgtcgtgattacctgctggaaaaggcacgtcaagaactgtcccgtaccaccaagccaaccgataagctgaagctgatcgatatgatccagcgtcttggcatcggcttctacctggaagatgatatcaacgcaatcctgcgtacccagttctccgtgaacgtgatcgatgaagaagatctgtccgcaaccggcttgcgtttccgtatgctgcgtcagaactcctttccaatctcctccgatatcttcaagcgtttccaggatcagaacgaaaagttcgatgaaaccctgaccaacgataccctgggcgtgatcgaactggtgcgttccatcatccacggcgaaccaaagggcgaagaaatcctggaagaagcaatggaattctctaagacccgtctgaagcgttccctgtcctccttgccagcacagatcaaggcagatgtcggccaggcattggaactgccaactcacttgcgtatggcacgtctggaagcacgtcgtttcattgaacagtacgcaacccagtccgatcacaacccaatcctgttggaattggcaaccctggattacaaccacgtgcagtcccagcaccagatggaactggtggaaatcacccgttggtggaagcagctgggccttgtggatcagctgtccttcgcacgtgatcgtcctctggaatgcttcctgtggaccgtgggcctgctgccagaaccaaagtactcctcctgccgtatcgaattggccaagaccattgcagtgctgctggtgattgatgatatcttcgatacctacggcaagatggatgatctgatcttgttcaccgatgcaatccagcgttgggatctgggtgccatggaatccctgccagaatacatgaagatctgctacatggcactgtacaaccttaccaacgaaatttgctacaaggtgctgaaagaaaacggctggaccgtgctgccttacctgaagtcctcctggatcgacatgatcgaaggcttcatggtcgaagcaaagtggttcaacggtggctgcgcaccaaacttggaagaatacgtggaaaacggcgtgtccaccgcaggctcctacatggccctggtgcacctgttctttctgatcggcgaaggcgtgaccgaacagaacgcacagctgctgatgaagaaaccttatccaaaggcattctcctccgctggccgtatcctgcgtttgtgggatgatttgggcaccgcaaaagaagaacaagaacgaggcgatctggcatcctccatcaacctgttcatgaaagaacgtaacctggcaaccgaagaggaaggccgtgaatgcatcttggaagatatctacggctactggaaggatctgaacggcgaattggtgtcccagaaagaaatgccactggcaatcatcaaggtggcactgaacatggctcgtgcatcccaggtcgtgtacaagcacgaagaagattcctacttctccaacgtggataactacgtgcaggcactgctgttcaccccactgatcatcggcggcggcggctccatggcctctgagaaagagatccgacgggagcggttcctaaatgtgttccccaagttggttgaggagctaaacgcctcgctgctggcgtacggaatgcctaaagaagcttgcgactggtacgctcattccctgaactataatactcctggcggtaagctgaaccggggcctctcggtcgtcgatacttacgccattctgtcgaacaagactgtcgagcagctgggccaggaggagtatgaaaaggtcgcaatccttggatggtgcattgagttgctgcaggcgtattggctggtggctgacgatatgatggacaagagtatcacccgacggggccagccttgttggtacaaggtgccggaagtcggagaaattgcgatttgggacgcttttatgcttgaggcggcgatttacaagctcctcaagtcgcacttcagaaacgagaagtactacattgatatcactgaactctttcacgaagtcacattccagaccgagctgggccagcttatggacctgatcaccgctcccgaggacaaagtcgacctttccaaattttccctcaagaaacactctttcatcgtgacctttaagacagcgtactacagcttttatctgcccgtcgctctcgccatgtacgtggcagggatcaccgacgagaaggatctcaaacaggctcgagatgtgcttatacccctgggagagtacttccagattcaggacgactacctggactgtttcggcacccctgaacagattggcaagatcggaactgacatccaggacaataaatgcagctgggtcattaataaagctttagaactggcctccgccgaacagcggaaaactctggacgagaactacggaaagaaggattccgtcgctgaagctaaatgtaagaagattttcaacgacctgaagatcgagcagctctatcacgagtacgaggagtcaattgccaaagacctcaaggcaaagatctctcaggttgacgagtcccggggttttaaggcggatgttctgaccgctttccttaataaggtatacaagaggagtaaa

SEQ ID NO: 1755 - DNA, 2730 bp, Artificial Sequence
  GPPS-GES engineered fusion
atgggttgcatccgttccaccactcacacctccaccaactacggcatcaactcccgtctgggcctgtcctttccagtgccaatcatctaccgtccagcaggcgcatcccgtaacatctctatctacatgtcctcctccgcagcaccaaacgtgacccaggtggtggttggcgcaaacgatgcactgctgcagtacacccaccaaccaatgctgatcccatccgaagtggatgcagataccgaacgtcgtgattacctgctggaaaaggcacgtcaagaactgtcccgtaccaccaagccaaccgataagctgaagctgatcgatatgatccagcgtcttggcatcggcttctacctggaagatgatatcaacgcaatcctgcgtacccagttctccgtgaacgtgatcgatgaagaagatctgtccgcaaccggcttgcgtttccgtatgctgcgtcagaactcctttccaatctcctccgatatcttcaagcgtttccaggatcagaacgaaaagttcgatgaaaccctgaccaacgataccctgggcgtgatcgaactggtgcgttccatcatccacggcgaaccaaagggcgaagaaatcctggaagaagcaatggaattctctaagacccgtctgaagcgttccctgtcctccttgccagcacagatcaaggcagatgtcggccaggcattggaactgccaactcacttgcgtatggcacgtctggaagcacgtcgtttcattgaacagtacgcaacccagtccgatcacaacccaatcctgttggaattggcaaccctggattacaaccacgtgcagtcccagcaccagatggaactggtggaaatcacccgttggtggaagcagctgggccttgtggatcagctgtccttcgcacgtgatcgtcctctggaatgcttcctgtggaccgtgggcctgctgccagaaccaaagtactcctcctgccgtatcgaattggccaagaccattgcagtgctgctggtgattgatgatatcttcgatacctacggcaagatggatgatctgatcttgttcaccgatgcaatccagcgttgggatctgggtgccatggaatccctgccagaatacatgaagatctgctacatggcactgtacaaccttaccaacgaaatttgctacaaggtgctgaaagaaaacggctggaccgtgctgccttacctgaagtcctcctggatcgacatgatcgaaggcttcatggtcgaagcaaagtggttcaacggtggctgcgcaccaaacttggaagaatacgtggaaaacggcgtgtccaccgcaggctcctacatggccctggtgcacctgttctttctgatcggcgaaggcgtgaccgaacagaacgcacagctgctgatgaagaaaccttatccaaaggcattctcctccgctggccgtatcctgcgtttgtgggatgatttgggcaccgcaaaagaagaacaagaacgaggcgatctggcatcctccatcaacctgttcatgaaagaacgtaacctggcaaccgaagaggaaggccgtgaatgcatcttggaagatatctacggctactggaaggatctgaacggcgaattggtgtcccagaaagaaatgccactggcaatcatcaaggtggcactgaacatggctcgtgcatcccaggtcgtgtacaagcacgaagaagattcctacttctccaacgtggataactacgtgcaggcactgctgttcaccccactgatcatcggcggcggcggctccatgcttcgctgttctaacacaaatgcccagttggcgaacctctccgaacaagtcaagggcaaggttacagagttcgatttcaaggagtacatgcgatctaaggctatgtctgtgaacgaggccctcgaccgagcggtgcccttgcgctaccccgagaagattcacgaggccatgcgttactccctgctggccggaggtaagagagtgcgacccatcctgtgtatcgccgcatgtgagctggtgggcgggtcagaggagttggccatgcctacagcctgcgccatggagatcattcacacaatgtctcttattcatgatgacctgccttgcatcgataatgacgacttgcggagaggcaagcctactaaccacaaggtcttcggagagggtaccgcggtcctggctggcgacgctctcttgtcgtttgctttcgaacatatagcagtgtccacaagcaagactgtggagtcggaccgcgtcctgcgagtcgtttccgagctcggtcgagcaattggttctgagggtgtcgccggtggtcaggtagcagacattacttctcagggaaacccatctgtcggcctcgagacactggaatggattcacattcataaaacagccgtcctcctggagtgctccgtcgcttccggcgccattattggtggggcttcggacgatgagattgaacgagttcgaaagtacgcccgatgtgttggactcctgtttcaggttgtcgacgacatcctggacgtgactaagagtagcgaagaacttggcaagaccgccgccaaagacttgctcagtgataaagctacttaccccaagctgatgggactcgaaaaggctaaggagtttgctgacgaactcctgggcaaggccaaggaggaattgtccttttttaaccccaccaaggcggcccccttgctcggattggctgattacatcgctcagcgccagaac

SEQ ID NO: 1756 - DNA, 2886 bp, Artificial Sequence
  GPPS-GES engineered fusion
atgggttgcatccgttccaccactcacacctccaccaactacggcatcaactcccgtctgggcctgtcctttccagtgccaatcatctaccgtccagcaggcgcatcccgtaacatctctatctacatgtcctcctccgcagcaccaaacgtgacccaggtggtggttggcgcaaacgatgcactgctgcagtacacccaccaaccaatgctgatcccatccgaagtggatgcagataccgaacgtcgtgattacctgctggaaaaggcacgtcaagaactgtcccgtaccaccaagccaaccgataagctgaagctgatcgatatgatccagcgtcttggcatcggcttctacctggaagatgatatcaacgcaatcctgcgtacccagttctccgtgaacgtgatcgatgaagaagatctgtccgcaaccggcttgcgtttccgtatgctgcgtcagaactcctttccaatctcctccgatatcttcaagcgtttccaggatcagaacgaaaagttcgatgaaaccctgaccaacgataccctgggcgtgatcgaactggtgcgttccatcatccacggcgaaccaaagggcgaagaaatcctggaagaagcaatggaattctctaagacccgtctgaagcgttccctgtcctccttgccagcacagatcaaggcagatgtcggccaggcattggaactgccaactcacttgcgtatggcacgtctggaagcacgtcgtttcattgaacagtacgcaacccagtccgatcacaacccaatcctgttggaattggcaaccctggattacaaccacgtgcagtcccagcaccagatggaactggtggaaatcacccgttggtggaagcagctgggccttgtggatcagctgtccttcgcacgtgatcgtcctctggaatgcttcctgtggaccgtgggcctgctgccagaaccaaagtactcctcctgccgtatcgaattggccaagaccattgcagtgctgctggtgattgatgatatcttcgatacctacggcaagatggatgatctgatcttgttcaccgatgcaatccagcgttgggatctgggtgccatggaatccctgccagaatacatgaagatctgctacatggcactgtacaaccttaccaacgaaatttgctacaaggtgctgaaagaaaacggctggaccgtgctgccttacctgaagtcctcctggatcgacatgatcgaaggcttcatggtcgaagcaaagtggttcaacggtggctgcgcaccaaacttggaagaatacgtggaaaacggcgtgtccaccgcaggctcctacatggccctggtgcacctgttctttctgatcggcgaaggcgtgaccgaacagaacgcacagctgctgatgaagaaaccttatccaaaggcattctcctccgctggccgtatcctgcgtttgtgggatgatttgggcaccgcaaaagaagaacaagaacgaggcgatctggcatcctccatcaacctgttcatgaaagaacgtaacctggcaaccgaagaggaaggccgtgaatgcatcttggaagatatctacggctactggaaggatctgaacggcgaattggtgtcccagaaagaaatgccactggcaatcatcaaggtggcactgaacatggctcgtgcatcccaggtcgtgtacaagcacgaagaagattcctacttctccaacgtggataactacgtgcaggcactgctgttcaccccactgatcatcggcggcggcggctccatgaaagacgtctcgctgagctcattcgatgcccacgacctcgacttagacaagttccccgaagtcgtccgagacaggctgactcagttcctcgacgcacaagagctaacaattgctgacatcggagcccctgtcactgatgctgttgcccacttgcgctctttcgtgttgaacggaggcaaacgaatcagacccctgtacgcttgggccgggttcctcgccgcgcagggacacaagaactcatccgagaagctggagtcagtgctggacgctgcggcatcgctggagttcattcaggcgtgcgccctgattcatgacgacatcatcgactcgtctgacaccagacgtggtgccccaactgttcatagggcagtggaggctgaccatagagccaacaactttgaaggagatcctgagcactttggcgtttccgtgagcatcttggccggcgatatggccttggtctgggcggaggatatgctccaggatagtggactttccgctgaggctctggcccgaacacgcgatgcctggcgaggtatgcgaaccgaggtaattggtggccagcttctcgatatctacctggagagtcatgccaacgagtccgttgagcttgctgacagcgtgaatcgctttaagacagccgcttacacaatcgcccgtcctctgcacctgggcgcctcgatcgctggtggctcccctcaactgattgacgcccttttgcactacggacacgatatcggcatcgccttccagctgcgagacgacttgctgggcgtttttggcgaccccgccattactggaaagcccgcgggcgacgatattcgtgaaggtaagcgtacagtcctgctagctctagctcttcagcgagctgacaagcagtctcctgaagctgcgaccgcaatcagggctggtgttggcaaggtcacatcccctgaagacatcgctgtgataaccgagcacatccgcgccactggtgccgaagaggaggtggaacagcggatttcacagctgacggagtccggcctcgcccaccttgacgacgttgacattccagacgaggttcgggcccagctgagagccctggcgattcgatccacagagagacgaatg

SEQ ID NO: 1757 - DNA, 2814 bp, Artificial Sequence
  GPPS-GES engineered fusion
atgggttgcatccgttccaccactcacacctccaccaactacggcatcaactcccgtctgggcctgtcctttccagtgccaatcatctaccgtccagcaggcgcatcccgtaacatctctatctacatgtcctcctccgcagcaccaaacgtgacccaggtggtggttggcgcaaacgatgcactgctgcagtacacccaccaaccaatgctgatcccatccgaagtggatgcagataccgaacgtcgtgattacctgctggaaaaggcacgtcaagaactgtcccgtaccaccaagccaaccgataagctgaagctgatcgatatgatccagcgtcttggcatcggcttctacctggaagatgatatcaacgcaatcctgcgtacccagttctccgtgaacgtgatcgatgaagaagatctgtccgcaaccggcttgcgtttccgtatgctgcgtcagaactcctttccaatctcctccgatatcttcaagcgtttccaggatcagaacgaaaagttcgatgaaaccctgaccaacgataccctgggcgtgatcgaactggtgcgttccatcatccacggcgaaccaaagggcgaagaaatcctggaagaagcaatggaattctctaagacccgtctgaagcgttccctgtcctccttgccagcacagatcaaggcagatgtcggccaggcattggaactgccaactcacttgcgtatggcacgtctggaagcacgtcgtttcattgaacagtacgcaacccagtccgatcacaacccaatcctgttggaattggcaaccctggattacaaccacgtgcagtcccagcaccagatggaactggtggaaatcacccgttggtggaagcagctgggccttgtggatcagctgtccttcgcacgtgatcgtcctctggaatgcttcctgtggaccgtgggcctgctgccagaaccaaagtactcctcctgccgtatcgaattggccaagaccattgcagtgctgctggtgattgatgatatcttcgatacctacggcaagatggatgatctgatcttgttcaccgatgcaatccagcgttgggatctgggtgccatggaatccctgccagaatacatgaagatctgctacatggcactgtacaaccttaccaacgaaatttgctacaaggtgctgaaagaaaacggctggaccgtgctgccttacctgaagtcctcctggatcgacatgatcgaaggcttcatggtcgaagcaaagtggttcaacggtggctgcgcaccaaacttggaagaatacgtggaaaacggcgtgtccaccgcaggctcctacatggccctggtgcacctgttctttctgatcggcgaaggcgtgaccgaacagaacgcacagctgctgatgaagaaaccttatccaaaggcattctcctccgctggccgtatcctgcgtttgtgggatgatttgggcaccgcaaaagaagaacaagaacgaggcgatctggcatcctccatcaacctgttcatgaaagaacgtaacctggcaaccgaagaggaaggccgtgaatgcatcttggaagatatctacggctactggaaggatctgaacggcgaattggtgtcccagaaagaaatgccactggcaatcatcaaggtggcactgaacatggctcgtgcatcccaggtcgtgtacaagcacgaagaagattcctacttctccaacgtggataactacgtgcaggcactgctgttcaccccactgatcatcggcggcggcggctccatgctcgctgaagagcagctggatccctttagcctggtcgctgacgaactctccctactggccgaccggctccgatcgatggtggtggcggaggtccccaaactcgcctcggccgccgagtacttctttaagatgggcgtggaaggtaagcgtttccgaccaacggtgctcctgctaatggccaccgccctgaacgttccccttcccagacccgctctcgcagaagttcccgaaaccctctcgaccgaactgcgaactcggcagcagtgtattgccgagatcaccgagatgatccacgtggcctccctgttgcatgatgatgtattggacgatgccgagactcggcggggcattggctctctgaacattatgatgggaaataaggtcgccgttcttgctggggattttctgctatcgcgtgcctgcgtggccctggcctcccttaagaacaccgaggtcgtgtccctgctcgccaccgttgttgagcatttggtcaccggcgagactatgcagatgacatccacttcggagcagagggtatccatggaatactatctccagaagacatactacaagacagcgtctctcatctccaactcatgtaaggctattgcccttctggccggacagacggctgaagtttctatgctggctttcgagtacggcaagaatcttggcctcgccttccagcttattgacgacgtccttgactttaccggcacgtcagcctctctgggcaaaggctccctgagcgacattcgacatggcatcatcacggcaccaattctgttcgccattgaggaatttcctcagcttgacgcggtcgtcaagcgaggactggataaccccgctgatatcgacttggctctcgactatctgggaaagtctcgtggtattcagcgaacacgagagctggcaatgaaacatgcaaacctcgccgccgaggcaattgatagcctgcccgagtcgggtgacgaggatgtactacggagccgtcgagccctcattgatcttacccacagggtcatcacccgtaccaag

SEQ ID NO: 1758 - DNA, 1329 bp, Artificial Sequence
  GPPS-GES engineered fusion
atgcaggaagcggttgcaaaagtcgcacagttgatcattatcattgatgatatttacgatgtctacggcaccgtggatgaactcgaactcttcaccaatgcaattgatcgctgggatctggaagccatggaacagctgccagaatacatgaagacgtgttttctggcgctgtacaactctattaacgagatcggatacgaaatcctcaaggaggagggacgaaacgtgattccgtatctgcgtaatacttggaccgagctctgcaaagcattcctggttgaagctaagtggtactcctccggctatacccccacactcgaggaatatctccagacctcctggatcagcattggctcgctgccgatgcagacctacgtgttcgccttgctgggaaaaaacttggcacctgaaagcagcggcggcggcggctccatggactttccccaacagctcgaagcctgtgtgaaacaggctaaccaggccctgtccagatttatcgccccccttcccttccagaacactcccgtggtagagactatgcagtacggagccctgctcggcggcaagcgattgcgacccttccttgtgtacgccaccggccatatgttcggcgtttctactaacacgctcgacgccccggctgctgccgtggagtgtattcatgcttacttcctgatccacgatgatctgccagccatggatgacgatgatttgcgtcgaggcctcccgacctgccacgttaagttcggcgaggcaaacgctatcctcgctggcgacgcccttcagacacttgcattctccattctgtcagatgctgatatgcccgaggttagtgatagagatcgtatctcgatgatttctgagctggctagcgcatcgggaattgccggcatgtgcggtggtcaggctcttgatttggatgccgagggcaaacatgtcccgctggacgctttggagaggattcatagacacaagacaggtgctctcatccgcgccgccgtccgactgggcgccttgtccgctggcgacaagggtcgacgagccctcccagtcctcgataagtatgctgaatccattggcttagccttccaggtgcaggacgacattctcgacgtcgtgggcgacacggccaccctcggaaaaagacagggcgctgaccagcaactgggcaagtcgacgtaccccgcgcttctgggcctcgaacaagcccgtaagaaggctagagacctcatcgacgacgcgcgtcagtccctcaagcaactggccgagcagtctttggacactagtgctctcgaagctttggctgactacattatccaacggaacaaa

SEQ ID NO: 1759 - DNA, 1488 bp, Artificial Sequence
  GPPS-GES engineered fusion
atgcaggaagcggttgcaaaagtcgcacagttgatcattatcattgatgatatttacgatgtctacggcaccgtggatgaactcgaactcttcaccaatgcaattgatcgctgggatctggaagccatggaacagctgccagaatacatgaagacgtgttttctggcgctgtacaactctattaacgagatcggatacgaaatcctcaaggaggagggacgaaacgtgattccgtatctgcgtaatacttggaccgagctctgcaaagcattcctggttgaagctaagtggtactcctccggctatacccccacactcgaggaatatctccagacctcctggatcagcattggctcgctgccgatgcagacctacgtgttcgccttgctgggaaaaaacttggcacctgaaagcagcggcggcggcggctccatggcctctgagaaagagatccgacgggagcggttcctaaatgtgttccccaagttggttgaggagctaaacgcctcgctgctggcgtacggaatgcctaaagaagcttgcgactggtacgctcattccctgaactataatactcctggcggtaagctgaaccggggcctctcggtcgtcgatacttacgccattctgtcgaacaagactgtcgagcagctgggccaggaggagtatgaaaaggtcgcaatccttggatggtgcattgagttgctgcaggcgtattggctggtggctgacgatatgatggacaagagtatcacccgacggggccagccttgttggtacaaggtgccggaagtcggagaaattgcgatttgggacgcttttatgcttgaggcggcgatttacaagctcctcaagtcgcacttcagaaacgagaagtactacattgatatcactgaactctttcacgaagtcacattccagaccgagctgggccagcttatggacctgatcaccgctcccgaggacaaagtcgacctttccaaattttccctcaagaaacactctttcatcgtgacctttaagacagcgtactacagcttttatctgcccgtcgctctcgccatgtacgtggcagggatcaccgacgagaaggatctcaaacaggctcgagatgtgcttatacccctgggagagtacttccagattcaggacgactacctggactgtttcggcacccctgaacagattggcaagatcggaactgacatccaggacaataaatgcagctgggtcattaataaagctttagaactggcctccgccgaacagcggaaaactctggacgagaactacggaaagaaggattccgtcgctgaagctaaatgtaagaagattttcaacgacctgaagatcgagcagctctatcacgagtacgaggagtcaattgccaaagacctcaaggcaaagatctctcaggttgacgagtcccggggttttaaggcggatgttctgaccgctttccttaataaggtatacaagaggagtaaa

SEQ ID NO: 1760 - DNA, 1389 bp, Artificial Sequence
  GPPS-GES engineered fusion
atgcaggaagcggttgcaaaagtcgcacagttgatcattatcattgatgatatttacgatgtctacggcaccgtggatgaactcgaactcttcaccaatgcaattgatcgctgggatctggaagccatggaacagctgccagaatacatgaagacgtgttttctggcgctgtacaactctattaacgagatcggatacgaaatcctcaaggaggagggacgaaacgtgattccgtatctgcgtaatacttggaccgagctctgcaaagcattcctggttgaagctaagtggtactcctccggctatacccccacactcgaggaatatctccagacctcctggatcagcattggctcgctgccgatgcagacctacgtgttcgccttgctgggaaaaaacttggcacctgaaagcagcggcggcggcggctccatgcttcgctgttctaacacaaatgcccagttggcgaacctctccgaacaagtcaagggcaaggttacagagttcgatttcaaggagtacatgcgatctaaggctatgtctgtgaacgaggccctcgaccgagcggtgcccttgcgctaccccgagaagattcacgaggccatgcgttactccctgctggccggaggtaagagagtgcgacccatcctgtgtatcgccgcatgtgagctggtgggcgggtcagaggagttggccatgcctacagcctgcgccatggagatcattcacacaatgtctcttattcatgatgacctgccttgcatcgataatgacgacttgcggagaggcaagcctactaaccacaaggtcttcggagagggtaccgcggtcctggctggcgacgctctcttgtcgtttgctttcgaacatatagcagtgtccacaagcaagactgtggagtcggaccgcgtcctgcgagtcgtttccgagctcggtcgagcaattggttctgagggtgtcgccggtggtcaggtagcagacattacttctcagggaaacccatctgtcggcctcgagacactggaatggattcacattcataaaacagccgtcctcctggagtgctccgtcgcttccggcgccattattggtggggcttcggacgatgagattgaacgagttcgaaagtacgcccgatgtgttggactcctgtttcaggttgtcgacgacatcctggacgtgactaagagtagcgaagaacttggcaagaccgccgccaaagacttgctcagtgataaagctacttaccccaagctgatgggactcgaaaaggctaaggagtttgctgacgaactcctgggcaaggccaaggaggaattgtccttttttaaccccaccaaggcggcccccttgctcggattggctgattacatcgctcagcgccagaac

SEQ ID NO: 1761 - DNA, 1545 bp, Artificial Sequence
  GPPS-GES engineered fusion
atgcaggaagcggttgcaaaagtcgcacagttgatcattatcattgatgatatttacgatgtctacggcaccgtggatgaactcgaactcttcaccaatgcaattgatcgctgggatctggaagccatggaacagctgccagaatacatgaagacgtgttttctggcgctgtacaactctattaacgagatcggatacgaaatcctcaaggaggagggacgaaacgtgattccgtatctgcgtaatacttggaccgagctctgcaaagcattcctggttgaagctaagtggtactcctccggctatacccccacactcgaggaatatctccagacctcctggatcagcattggctcgctgccgatgcagacctacgtgttcgccttgctgggaaaaaacttggcacctgaaagcagcggcggcggcggctccatgaaagacgtctcgctgagctcattcgatgcccacgacctcgacttagacaagttccccgaagtcgtccgagacaggctgactcagttcctcgacgcacaagagctaacaattgctgacatcggagcccctgtcactgatgctgttgcccacttgcgctctttcgtgttgaacggaggcaaacgaatcagacccctgtacgcttgggccgggttcctcgccgcgcagggacacaagaactcatccgagaagctggagtcagtgctggacgctgcggcatcgctggagttcattcaggcgtgcgccctgattcatgacgacatcatcgactcgtctgacaccagacgtggtgccccaactgttcatagggcagtggaggctgaccatagagccaacaactttgaaggagatcctgagcactttggcgtttccgtgagcatcttggccggcgatatggccttggtctgggcggaggatatgctccaggatagtggactttccgctgaggctctggcccgaacacgcgatgcctggcgaggtatgcgaaccgaggtaattggtggccagcttctcgatatctacctggagagtcatgccaacgagtccgttgagcttgctgacagcgtgaatcgctttaagacagccgcttacacaatcgcccgtcctctgcacctgggcgcctcgatcgctggtggctcccctcaactgattgacgcccttttgcactacggacacgatatcggcatcgccttccagctgcgagacgacttgctgggcgtttttggcgaccccgccattactggaaagcccgcgggcgacgatattcgtgaaggtaagcgtacagtcctgctagctctagctcttcagcgagctgacaagcagtctcctgaagctgcgaccgcaatcagggctggtgttggcaaggtcacatcccctgaagacatcgctgtgataaccgagcacatccgcgccactggtgccgaagaggaggtggaacagcggatttcacagctgacggagtccggcctcgcccaccttgacgacgttgacattccagacgaggttcgggcccagctgagagccctggcgattcgatccacagagagacgaatg

SEQ ID NO: 1762 - DNA, 1473 bp, Artificial Sequence
  GPPS-GES engineered fusion
atgcaggaagcggttgcaaaagtcgcacagttgatcattatcattgatgatatttacgatgtctacggcaccgtggatgaactcgaactcttcaccaatgcaattgatcgctgggatctggaagccatggaacagctgccagaatacatgaagacgtgttttctggcgctgtacaactctattaacgagatcggatacgaaatcctcaaggaggagggacgaaacgtgattccgtatctgcgtaatacttggaccgagctctgcaaagcattcctggttgaagctaagtggtactcctccggctatacccccacactcgaggaatatctccagacctcctggatcagcattggctcgctgccgatgcagacctacgtgttcgccttgctgggaaaaaacttggcacctgaaagcagcggcggcggcggctccatgctcgctgaagagcagctggatccctttagcctggtcgctgacgaactctccctactggccgaccggctccgatcgatggtggtggcggaggtccccaaactcgcctcggccgccgagtacttctttaagatgggcgtggaaggtaagcgtttccgaccaacggtgctcctgctaatggccaccgccctgaacgttccccttcccagacccgctctcgcagaagttcccgaaaccctctcgaccgaactgcgaactcggcagcagtgtattgccgagatcaccgagatgatccacgtggcctccctgttgcatgatgatgtattggacgatgccgagactcggcggggcattggctctctgaacattatgatgggaaataaggtcgccgttcttgctggggattttctgctatcgcgtgcctgcgtggccctggcctcccttaagaacaccgaggtcgtgtccctgctcgccaccgttgttgagcatttggtcaccggcgagactatgcagatgacatccacttcggagcagagggtatccatggaatactatctccagaagacatactacaagacagcgtctctcatctccaactcatgtaaggctattgcccttctggccggacagacggctgaagtttctatgctggctttcgagtacggcaagaatcttggcctcgccttccagcttattgacgacgtccttgactttaccggcacgtcagcctctctgggcaaaggctccctgagcgacattcgacatggcatcatcacggcaccaattctgttcgccattgaggaatttcctcagcttgacgcggtcgtcaagcgaggactggataaccccgctgatatcgacttggctctcgactatctgggaaagtctcgtggtattcagcgaacacgagagctggcaatgaaacatgcaaacctcgccgccgaggcaattgatagcctgcccgagtcgggtgacgaggatgtactacggagccgtcgagccctcattgatcttacccacagggtcatcacccgtaccaag

SEQ ID NO: 1763 - DNA, 2721 bp, Artificial Sequence
  GPPS-GES engineered fusion
atgtcgtccatctcgcagaaggtggtcattggcttgaacaaagcggcagccaacaacaaccttcaaaatctcgaccgccgcggcttcaagactcgctgcgtgagcagctccaaagcagcctcttgtcttcgcgcttcctgctcgctccaactcgacgtgaaaccagttcaggaaggccgtcgttccggcaactaccaaccatcaatttgggactttaattacgtacagagcttgaacacgccatacaaggaagagcgttacctcacccgacacgctgagctgattgtccaagtaaaacctctcctggaaaagaaaatggaaccagcgcagcaactggaacttatcgatgatttgaataaccttggcctgtcctacttctttcaagaccgcattaaacagatcctctccttcatctacgatgaaaaccagtgctttcactccaacatcaacgatcaggcagaaaaacgtgacctgtactttacagctttgggcttccgactcctgcgacagcacggcttcgatgttagccaggaagtgttcgattgcttcaagaatgacaacggttctgacttcaaggcctccctctctgacaataccaagggcctgctccagttgtatgaagcatccttcctcgtccgcgaaggtgaagacactctggaacaagcgcgtcaattcgcaactaagttcctgcgccgcaagcttgatgagatcgacgataatcatctgctgtcttgcattcaccattcactcgagattccgcttcactggcgcatccagcgcctcgaggctcgctggtttctggatgcttacgcaacccgccacgacatgaacccggtgattctggaacttgcaaagctggatttcaacatcatccaagcgacccaccaggaggaactcaaggacgtgtcccgttggtggcagaacacacgacttgcagaaaaactgccatttgtgcgtgaccgtctggtcgaatcctacttttgggctatcgcactcttcgaaccgcatcagtacggctaccagcgccgtgtcgccgcaaagattatcacccttgcaaccagcatcgatgacgtatacgatatctacggcaccttggacgaactgcaactgttcaccgataacttccgccgctgggacaccgaatcgttgggccgcttgccttattccatgcaactgttctatatggtgatccataactttgtatcagaattggcatacgagattctcaaagaaaaaggcttcatcgtcatcccctaccttcaacgctcttgggtcgatttggcggaatccttcttgaaagaagcaaattggtactactcaggctacacgccatcactcgaggagtatatcgataatggctcgattagcatcggcgcagtcgccgttctttcccaggtttacttcaccttggcgaactccattgaaaaaccgaagatcgaatccatgtataagtatcaccatatcctgcgcctcagcggactccttgttcgtctgcacgacgatcttggtacgtcacttttcgaaaaaaaacgtggcgacgtgccgaaagccgtcgagatttgcatgaaggagcgtaacgtgactgaagaggaggctgaggagcacgttaaatatctcatccgcgaagcctggaaagagatgaacaccgcaaccactgctgcaggatgtccattcatggacgagctcaacgttgcagcagcaaacctcggtcgcgcggcacaattcgtgtacttggatggcgatggtcacggagtgcagcactctaaaattcaccagcagatgggcggcctcatgttcgaaccctacgtcggcggcggcggctccatggactttccccaacagctcgaagcctgtgtgaaacaggctaaccaggccctgtccagatttatcgccccccttcccttccagaacactcccgtggtagagactatgcagtacggagccctgctcggcggcaagcgattgcgacccttccttgtgtacgccaccggccatatgttcggcgtttctactaacacgctcgacgccccggctgctgccgtggagtgtattcatgcttacttcctgatccacgatgatctgccagccatggatgacgatgatttgcgtcgaggcctcccgacctgccacgttaagttcggcgaggcaaacgctatcctcgctggcgacgcccttcagacacttgcattctccattctgtcagatgctgatatgcccgaggttagtgatagagatcgtatctcgatgatttctgagctggctagcgcatcgggaattgccggcatgtgcggtggtcaggctcttgatttggatgccgagggcaaacatgtcccgctggacgctttggagaggattcatagacacaagacaggtgctctcatccgcgccgccgtccgactgggcgccttgtccgctggcgacaagggtcgacgagccctcccagtcctcgataagtatgctgaatccattggcttagccttccaggtgcaggacgacattctcgacgtcgtgggcgacacggccaccctcggaaaaagacagggcgctgaccagcaactgggcaagtcgacgtaccccgcgcttctgggcctcgaacaagcccgtaagaaggctagagacctcatcgacgacgcgcgtcagtccctcaagcaactggccgagcagtctttggacactagtgctctcgaagctttggctgactacattatccaacggaacaaa

SEQ ID NO: 1764 - DNA, 2880 bp, Artificial Sequence
  GPPS-GES engineered fusion
atgtcgtccatctcgcagaaggtggtcattggcttgaacaaagcggcagccaacaacaaccttcaaaatctcgaccgccgcggcttcaagactcgctgcgtgagcagctccaaagcagcctcttgtcttcgcgcttcctgctcgctccaactcgacgtgaaaccagttcaggaaggccgtcgttccggcaactaccaaccatcaatttgggactttaattacgtacagagcttgaacacgccatacaaggaagagcgttacctcacccgacacgctgagctgattgtccaagtaaaacctctcctggaaaagaaaatggaaccagcgcagcaactggaacttatcgatgatttgaataaccttggcctgtcctacttctttcaagaccgcattaaacagatcctctccttcatctacgatgaaaaccagtgctttcactccaacatcaacgatcaggcagaaaaacgtgacctgtactttacagctttgggcttccgactcctgcgacagcacggcttcgatgttagccaggaagtgttcgattgcttcaagaatgacaacggttctgacttcaaggcctccctctctgacaataccaagggcctgctccagttgtatgaagcatccttcctcgtccgcgaaggtgaagacactctggaacaagcgcgtcaattcgcaactaagttcctgcgccgcaagcttgatgagatcgacgataatcatctgctgtcttgcattcaccattcactcgagattccgcttcactggcgcatccagcgcctcgaggctcgctggtttctggatgcttacgcaacccgccacgacatgaacccggtgattctggaacttgcaaagctggatttcaacatcatccaagcgacccaccaggaggaactcaaggacgtgtcccgttggtggcagaacacacgacttgcagaaaaactgccatttgtgcgtgaccgtctggtcgaatcctacttttgggctatcgcactcttcgaaccgcatcagtacggctaccagcgccgtgtcgccgcaaagattatcacccttgcaaccagcatcgatgacgtatacgatatctacggcaccttggacgaactgcaactgttcaccgataacttccgccgctgggacaccgaatcgttgggccgcttgccttattccatgcaactgttctatatggtgatccataactttgtatcagaattggcatacgagattctcaaagaaaaaggcttcatcgtcatcccctaccttcaacgctcttgggtcgatttggcggaatccttcttgaaagaagcaaattggtactactcaggctacacgccatcactcgaggagtatatcgataatggctcgattagcatcggcgcagtcgccgttctttcccaggtttacttcaccttggcgaactccattgaaaaaccgaagatcgaatccatgtataagtatcaccatatcctgcgcctcagcggactccttgttcgtctgcacgacgatcttggtacgtcacttttcgaaaaaaaacgtggcgacgtgccgaaagccgtcgagatttgcatgaaggagcgtaacgtgactgaagaggaggctgaggagcacgttaaatatctcatccgcgaagcctggaaagagatgaacaccgcaaccactgctgcaggatgtccattcatggacgagctcaacgttgcagcagcaaacctcggtcgcgcggcacaattcgtgtacttggatggcgatggtcacggagtgcagcactctaaaattcaccagcagatgggcggcctcatgttcgaaccctacgtcggcggcggcggctccatggcctctgagaaagagatccgacgggagcggttcctaaatgtgttccccaagttggttgaggagctaaacgcctcgctgctggcgtacggaatgcctaaagaagcttgcgactggtacgctcattccctgaactataatactcctggcggtaagctgaaccggggcctctcggtcgtcgatacttacgccattctgtcgaacaagactgtcgagcagctgggccaggaggagtatgaaaaggtcgcaatccttggatggtgcattgagttgctgcaggcgtattggctggtggctgacgatatgatggacaagagtatcacccgacggggccagccttgttggtacaaggtgccggaagtcggagaaattgcgatttgggacgcttttatgcttgaggcggcgatttacaagctcctcaagtcgcacttcagaaacgagaagtactacattgatatcactgaactctttcacgaagtcacattccagaccgagctgggccagcttatggacctgatcaccgctcccgaggacaaagtcgacctttccaaattttccctcaagaaacactctttcatcgtgacctttaagacagcgtactacagcttttatctgcccgtcgctctcgccatgtacgtggcagggatcaccgacgagaaggatctcaaacaggctcgagatgtgcttatacccctgggagagtacttccagattcaggacgactacctggactgtttcggcacccctgaacagattggcaagatcggaactgacatccaggacaataaatgcagctgggtcattaataaagctttagaactggcctccgccgaacagcggaaaactctggacgagaactacggaaagaaggattccgtcgctgaagctaaatgtaagaagattttcaacgacctgaagatcgagcagctctatcacgagtacgaggagtcaattgccaaagacctcaaggcaaagatctctcaggttgacgagtcccggggttttaaggcggatgttctgaccgctttccttaataaggtatacaagaggagtaaa

SEQ ID NO: 1765 - DNA, 2781 bp, Artificial Sequence
  GPPS-GES engineered fusion
atgtcgtccatctcgcagaaggtggtcattggcttgaacaaagcggcagccaacaacaaccttcaaaatctcgaccgccgcggcttcaagactcgctgcgtgagcagctccaaagcagcctcttgtcttcgcgcttcctgctcgctccaactcgacgtgaaaccagttcaggaaggccgtcgttccggcaactaccaaccatcaatttgggactttaattacgtacagagcttgaacacgccatacaaggaagagcgttacctcacccgacacgctgagctgattgtccaagtaaaacctctcctggaaaagaaaatggaaccagcgcagcaactggaacttatcgatgatttgaataaccttggcctgtcctacttctttcaagaccgcattaaacagatcctctccttcatctacgatgaaaaccagtgctttcactccaacatcaacgatcaggcagaaaaacgtgacctgtactttacagctttgggcttccgactcctgcgacagcacggcttcgatgttagccaggaagtgttcgattgcttcaagaatgacaacggttctgacttcaaggcctccctctctgacaataccaagggcctgctccagttgtatgaagcatccttcctcgtccgcgaaggtgaagacactctggaacaagcgcgtcaattcgcaactaagttcctgcgccgcaagcttgatgagatcgacgataatcatctgctgtcttgcattcaccattcactcgagattccgcttcactggcgcatccagcgcctcgaggctcgctggtttctggatgcttacgcaacccgccacgacatgaacccggtgattctggaacttgcaaagctggatttcaacatcatccaagcgacccaccaggaggaactcaaggacgtgtcccgttggtggcagaacacacgacttgcagaaaaactgccatttgtgcgtgaccgtctggtcgaatcctacttttgggctatcgcactcttcgaaccgcatcagtacggctaccagcgccgtgtcgccgcaaagattatcacccttgcaaccagcatcgatgacgtatacgatatctacggcaccttggacgaactgcaactgttcaccgataacttccgccgctgggacaccgaatcgttgggccgcttgccttattccatgcaactgttctatatggtgatccataactttgtatcagaattggcatacgagattctcaaagaaaaaggcttcatcgtcatcccctaccttcaacgctcttgggtcgatttggcggaatccttcttgaaagaagcaaattggtactactcaggctacacgccatcactcgaggagtatatcgataatggctcgattagcatcggcgcagtcgccgttctttcccaggtttacttcaccttggcgaactccattgaaaaaccgaagatcgaatccatgtataagtatcaccatatcctgcgcctcagcggactccttgttcgtctgcacgacgatcttggtacgtcacttttcgaaaaaaaacgtggcgacgtgccgaaagccgtcgagatttgcatgaaggagcgtaacgtgactgaagaggaggctgaggagcacgttaaatatctcatccgcgaagcctggaaagagatgaacaccgcaaccactgctgcaggatgtccattcatggacgagctcaacgttgcagcagcaaacctcggtcgcgcggcacaattcgtgtacttggatggcgatggtcacggagtgcagcactctaaaattcaccagcagatgggcggcctcatgttcgaaccctacgtcggcggcggcggctccatgcttcgctgttctaacacaaatgcccagttggcgaacctctccgaacaagtcaagggcaaggttacagagttcgatttcaaggagtacatgcgatctaaggctatgtctgtgaacgaggccctcgaccgagcggtgcccttgcgctaccccgagaagattcacgaggccatgcgttactccctgctggccggaggtaagagagtgcgacccatcctgtgtatcgccgcatgtgagctggtgggcgggtcagaggagttggccatgcctacagcctgcgccatggagatcattcacacaatgtctcttattcatgatgacctgccttgcatcgataatgacgacttgcggagaggcaagcctactaaccacaaggtcttcggagagggtaccgcggtcctggctggcgacgctctcttgtcgtttgctttcgaacatatagcagtgtccacaagcaagactgtggagtcggaccgcgtcctgcgagtcgtttccgagctcggtcgagcaattggttctgagggtgtcgccggtggtcaggtagcagacattacttctcagggaaacccatctgtcggcctcgagacactggaatggattcacattcataaaacagccgtcctcctggagtgctccgtcgcttccggcgccattattggtggggcttcggacgatgagattgaacgagttcgaaagtacgcccgatgtgttggactcctgtttcaggttgtcgacgacatcctggacgtgactaagagtagcgaagaacttggcaagaccgccgccaaagacttgctcagtgataaagctacttaccccaagctgatgggactcgaaaaggctaaggagtttgctgacgaactcctgggcaaggccaaggaggaattgtccttttttaaccccaccaaggcggcccccttgctcggattggctgattacatcgctcagcgccagaac

SEQ ID NO: 1766 - DNA, 2937 bp, Artificial Sequence
  GPPS-GES engineered fusion
atgtcgtccatctcgcagaaggtggtcattggcttgaacaaagcggcagccaacaacaaccttcaaaatctcgaccgccgcggcttcaagactcgctgcgtgagcagctccaaagcagcctcttgtcttcgcgcttcctgctcgctccaactcgacgtgaaaccagttcaggaaggccgtcgttccggcaactaccaaccatcaatttgggactttaattacgtacagagcttgaacacgccatacaaggaagagcgttacctcacccgacacgctgagctgattgtccaagtaaaacctctcctggaaaagaaaatggaaccagcgcagcaactggaacttatcgatgatttgaataaccttggcctgtcctacttctttcaagaccgcattaaacagatcctctccttcatctacgatgaaaaccagtgctttcactccaacatcaacgatcaggcagaaaaacgtgacctgtactttacagctttgggcttccgactcctgcgacagcacggcttcgatgttagccaggaagtgttcgattgcttcaagaatgacaacggttctgacttcaaggcctccctctctgacaataccaagggcctgctccagttgtatgaagcatccttcctcgtccgcgaaggtgaagacactctggaacaagcgcgtcaattcgcaactaagttcctgcgccgcaagcttgatgagatcgacgataatcatctgctgtcttgcattcaccattcactcgagattccgcttcactggcgcatccagcgcctcgaggctcgctggtttctggatgcttacgcaacccgccacgacatgaacccggtgattctggaacttgcaaagctggatttcaacatcatccaagcgacccaccaggaggaactcaaggacgtgtcccgttggtggcagaacacacgacttgcagaaaaactgccatttgtgcgtgaccgtctggtcgaatcctacttttgggctatcgcactcttcgaaccgcatcagtacggctaccagcgccgtgtcgccgcaaagattatcacccttgcaaccagcatcgatgacgtatacgatatctacggcaccttggacgaactgcaactgttcaccgataacttccgccgctgggacaccgaatcgttgggccgcttgccttattccatgcaactgttctatatggtgatccataactttgtatcagaattggcatacgagattctcaaagaaaaaggcttcatcgtcatcccctaccttcaacgctcttgggtcgatttggcggaatccttcttgaaagaagcaaattggtactactcaggctacacgccatcactcgaggagtatatcgataatggctcgattagcatcggcgcagtcgccgttctttcccaggtttacttcaccttggcgaactccattgaaaaaccgaagatcgaatccatgtataagtatcaccatatcctgcgcctcagcggactccttgttcgtctgcacgacgatcttggtacgtcacttttcgaaaaaaaacgtggcgacgtgccgaaagccgtcgagatttgcatgaaggagcgtaacgtgactgaagaggaggctgaggagcacgttaaatatctcatccgcgaagcctggaaagagatgaacaccgcaaccactgctgcaggatgtccattcatggacgagctcaacgttgcagcagcaaacctcggtcgcgcggcacaattcgtgtacttggatggcgatggtcacggagtgcagcactctaaaattcaccagcagatgggcggcctcatgttcgaaccctacgtcggcggcggcggctccatgaaagacgtctcgctgagctcattcgatgcccacgacctcgacttagacaagttccccgaagtcgtccgagacaggctgactcagttcctcgacgcacaagagctaacaattgctgacatcggagcccctgtcactgatgctgttgcccacttgcgctctttcgtgttgaacggaggcaaacgaatcagacccctgtacgcttgggccgggttcctcgccgcgcagggacacaagaactcatccgagaagctggagtcagtgctggacgctgcggcatcgctggagttcattcaggcgtgcgccctgattcatgacgacatcatcgactcgtctgacaccagacgtggtgccccaactgttcatagggcagtggaggctgaccatagagccaacaactttgaaggagatcctgagcactttggcgtttccgtgagcatcttggccggcgatatggccttggtctgggcggaggatatgctccaggatagtggactttccgctgaggctctggcccgaacacgcgatgcctggcgaggtatgcgaaccgaggtaattggtggccagcttctcgatatctacctggagagtcatgccaacgagtccgttgagcttgctgacagcgtgaatcgctttaagacagccgcttacacaatcgcccgtcctctgcacctgggcgcctcgatcgctggtggctcccctcaactgattgacgcccttttgcactacggacacgatatcggcatcgccttccagctgcgagacgacttgctgggcgtttttggcgaccccgccattactggaaagcccgcgggcgacgatattcgtgaaggtaagcgtacagtcctgctagctctagctcttcagcgagctgacaagcagtctcctgaagctgcgaccgcaatcagggctggtgttggcaaggtcacatcccctgaagacatcgctgtgataaccgagcacatccgcgccactggtgccgaagaggaggtggaacagcggatttcacagctgacggagtccggcctcgcccaccttgacgacgttgacattccagacgaggttcgggcccagctgagagccctggcgattcgatccacagagagacgaatg

SEQ ID NO: 1767 - DNA, 2865 bp, Artificial Sequence
  GPPS-GES engineered fusion
atgtcgtccatctcgcagaaggtggtcattggcttgaacaaagcggcagccaacaacaaccttcaaaatctcgaccgccgcggcttcaagactcgctgcgtgagcagctccaaagcagcctcttgtcttcgcgcttcctgctcgctccaactcgacgtgaaaccagttcaggaaggccgtcgttccggcaactaccaaccatcaatttgggactttaattacgtacagagcttgaacacgccatacaaggaagagcgttacctcacccgacacgctgagctgattgtccaagtaaaacctctcctggaaaagaaaatggaaccagcgcagcaactggaacttatcgatgatttgaataaccttggcctgtcctacttctttcaagaccgcattaaacagatcctctccttcatctacgatgaaaaccagtgctttcactccaacatcaacgatcaggcagaaaaacgtgacctgtactttacagctttgggcttccgactcctgcgacagcacggcttcgatgttagccaggaagtgttcgattgcttcaagaatgacaacggttctgacttcaaggcctccctctctgacaataccaagggcctgctccagttgtatgaagcatccttcctcgtccgcgaaggtgaagacactctggaacaagcgcgtcaattcgcaactaagttcctgcgccgcaagcttgatgagatcgacgataatcatctgctgtcttgcattcaccattcactcgagattccgcttcactggcgcatccagcgcctcgaggctcgctggtttctggatgcttacgcaacccgccacgacatgaacccggtgattctggaacttgcaaagctggatttcaacatcatccaagcgacccaccaggaggaactcaaggacgtgtcccgttggtggcagaacacacgacttgcagaaaaactgccatttgtgcgtgaccgtctggtcgaatcctacttttgggctatcgcactcttcgaaccgcatcagtacggctaccagcgccgtgtcgccgcaaagattatcacccttgcaaccagcatcgatgacgtatacgatatctacggcaccttggacgaactgcaactgttcaccgataacttccgccgctgggacaccgaatcgttgggccgcttgccttattccatgcaactgttctatatggtgatccataactttgtatcagaattggcatacgagattctcaaagaaaaaggcttcatcgtcatcccctaccttcaacgctcttgggtcgatttggcggaatccttcttgaaagaagcaaattggtactactcaggctacacgccatcactcgaggagtatatcgataatggctcgattagcatcggcgcagtcgccgttctttcccaggtttacttcaccttggcgaactccattgaaaaaccgaagatcgaatccatgtataagtatcaccatatcctgcgcctcagcggactccttgttcgtctgcacgacgatcttggtacgtcacttttcgaaaaaaaacgtggcgacgtgccgaaagccgtcgagatttgcatgaaggagcgtaacgtgactgaagaggaggctgaggagcacgttaaatatctcatccgcgaagcctggaaagagatgaacaccgcaaccactgctgcaggatgtccattcatggacgagctcaacgttgcagcagcaaacctcggtcgcgcggcacaattcgtgtacttggatggcgatggtcacggagtgcagcactctaaaattcaccagcagatgggcggcctcatgttcgaaccctacgtcggcggcggcggctccatgctcgctgaagagcagctggatccctttagcctggtcgctgacgaactctccctactggccgaccggctccgatcgatggtggtggcggaggtccccaaactcgcctcggccgccgagtacttctttaagatgggcgtggaaggtaagcgtttccgaccaacggtgctcctgctaatggccaccgccctgaacgttccccttcccagacccgctctcgcagaagttcccgaaaccctctcgaccgaactgcgaactcggcagcagtgtattgccgagatcaccgagatgatccacgtggcctccctgttgcatgatgatgtattggacgatgccgagactcggcggggcattggctctctgaacattatgatgggaaataaggtcgccgttcttgctggggattttctgctatcgcgtgcctgcgtggccctggcctcccttaagaacaccgaggtcgtgtccctgctcgccaccgttgttgagcatttggtcaccggcgagactatgcagatgacatccacttcggagcagagggtatccatggaatactatctccagaagacatactacaagacagcgtctctcatctccaactcatgtaaggctattgcccttctggccggacagacggctgaagtttctatgctggctttcgagtacggcaagaatcttggcctcgccttccagcttattgacgacgtccttgactttaccggcacgtcagcctctctgggcaaaggctccctgagcgacattcgacatggcatcatcacggcaccaattctgttcgccattgaggaatttcctcagcttgacgcggtcgtcaagcgaggactggataaccccgctgatatcgacttggctctcgactatctgggaaagtctcgtggtattcagcgaacacgagagctggcaatgaaacatgcaaacctcgccgccgaggcaattgatagcctgcccgagtcgggtgacgaggatgtactacggagccgtcgagccctcattgatcttacccacagggtcatcacccgtaccaag

SEQ ID NO: 1768 - DNA, 1470 bp, Artificial Sequence
  GPPS-GES engineered fusion
atggaagaagcgaagtggttcaaccgtggatacatccctaccctggatgaatacttggcaaacggcgttatttccggcggtacttgtatggctttggtccacgcgttctttctgatgggtaaaggagtcatgaaggaaacggaagcaatgatggaaccataccctcgttgctttacatcttccggtaaaatcctccgcctgtgggatgacctcggcacctcccgcgaggaacaggagcgaggcgacgtagcttcctccatcgaatgtctgatgaacgaaaagaacatcgccctcgaagacggagctcgtaaacacgttcgccaactgatcggttccctctggatcgaactcaatggcgaactggtggcacctacgggtctgccgctctctaccatcaaggcatccttcaatctgtcccgcaccgcccaagcaatttaccaacacggtaacgataacacagcgtcatcggtacaagatcatgtgcagtccctgttcttcaacccgatcggcttccaaacccgctccccaaatcatcgtaacgtcacactctccaaccgcggcggcggcggctccatggactttccccaacagctcgaagcctgtgtgaaacaggctaaccaggccctgtccagatttatcgccccccttcccttccagaacactcccgtggtagagactatgcagtacggagccctgctcggcggcaagcgattgcgacccttccttgtgtacgccaccggccatatgttcggcgtttctactaacacgctcgacgccccggctgctgccgtggagtgtattcatgcttacttcctgatccacgatgatctgccagccatggatgacgatgatttgcgtcgaggcctcccgacctgccacgttaagttcggcgaggcaaacgctatcctcgctggcgacgcccttcagacacttgcattctccattctgtcagatgctgatatgcccgaggttagtgatagagatcgtatctcgatgatttctgagctggctagcgcatcgggaattgccggcatgtgcggtggtcaggctcttgatttggatgccgagggcaaacatgtcccgctggacgctttggagaggattcatagacacaagacaggtgctctcatccgcgccgccgtccgactgggcgccttgtccgctggcgacaagggtcgacgagccctcccagtcctcgataagtatgctgaatccattggcttagccttccaggtgcaggacgacattctcgacgtcgtgggcgacacggccaccctcggaaaaagacagggcgctgaccagcaactgggcaagtcgacgtaccccgcgcttctgggcctcgaacaagcccgtaagaaggctagagacctcatcgacgacgcgcgtcagtccctcaagcaactggccgagcagtctttggacactagtgctctcgaagctttggctgactacattatccaacggaacaaa

SEQ ID NO: 1769 - DNA, 1629 bp, Artificial Sequence
  GPPS-GES engineered fusion
atggaagaagcgaagtggttcaaccgtggatacatccctaccctggatgaatacttggcaaacggcgttatttccggcggtacttgtatggctttggtccacgcgttctttctgatgggtaaaggagtcatgaaggaaacggaagcaatgatggaaccataccctcgttgctttacatcttccggtaaaatcctccgcctgtgggatgacctcggcacctcccgcgaggaacaggagcgaggcgacgtagcttcctccatcgaatgtctgatgaacgaaaagaacatcgccctcgaagacggagctcgtaaacacgttcgccaactgatcggttccctctggatcgaactcaatggcgaactggtggcacctacgggtctgccgctctctaccatcaaggcatccttcaatctgtcccgcaccgcccaagcaatttaccaacacggtaacgataacacagcgtcatcggtacaagatcatgtgcagtccctgttcttcaacccgatcggcttccaaacccgctccccaaatcatcgtaacgtcacactctccaaccgcggcggcggcggctccatggcctctgagaaagagatccgacgggagcggttcctaaatgtgttccccaagttggttgaggagctaaacgcctcgctgctggcgtacggaatgcctaaagaagcttgcgactggtacgctcattccctgaactataatactcctggcggtaagctgaaccggggcctctcggtcgtcgatacttacgccattctgtcgaacaagactgtcgagcagctgggccaggaggagtatgaaaaggtcgcaatccttggatggtgcattgagttgctgcaggcgtattggctggtggctgacgatatgatggacaagagtatcacccgacggggccagccttgttggtacaaggtgccggaagtcggagaaattgcgatttgggacgcttttatgcttgaggcggcgatttacaagctcctcaagtcgcacttcagaaacgagaagtactacattgatatcactgaactctttcacgaagtcacattccagaccgagctgggccagcttatggacctgatcaccgctcccgaggacaaagtcgacctttccaaattttccctcaagaaacactctttcatcgtgacctttaagacagcgtactacagcttttatctgcccgtcgctctcgccatgtacgtggcagggatcaccgacgagaaggatctcaaacaggctcgagatgtgcttatacccctgggagagtacttccagattcaggacgactacctggactgtttcggcacccctgaacagattggcaagatcggaactgacatccaggacaataaatgcagctgggtcattaataaagctttagaactggcctccgccgaacagcggaaaactctggacgagaactacggaaagaaggattccgtcgctgaagctaaatgtaagaagattttcaacgacctgaagatcgagcagctctatcacgagtacgaggagtcaattgccaaagacctcaaggcaaagatctctcaggttgacgagtcccggggttttaaggcggatgttctgaccgctttccttaataaggtatacaagaggagtaaa

SEQ ID NO: 1770 - DNA, 1530 bp, Artificial Sequence
  GPPS-GES engineered fusion
atggaagaagcgaagtggttcaaccgtggatacatccctaccctggatgaatacttggcaaacggcgttatttccggcggtacttgtatggctttggtccacgcgttctttctgatgggtaaaggagtcatgaaggaaacggaagcaatgatggaaccataccctcgttgctttacatcttccggtaaaatcctccgcctgtgggatgacctcggcacctcccgcgaggaacaggagcgaggcgacgtagcttcctccatcgaatgtctgatgaacgaaaagaacatcgccctcgaagacggagctcgtaaacacgttcgccaactgatcggttccctctggatcgaactcaatggcgaactggtggcacctacgggtctgccgctctctaccatcaaggcatccttcaatctgtcccgcaccgcccaagcaatttaccaacacggtaacgataacacagcgtcatcggtacaagatcatgtgcagtccctgttcttcaacccgatcggcttccaaacccgctccccaaatcatcgtaacgtcacactctccaaccgcggcggcggcggctccatgcttcgctgttctaacacaaatgcccagttggcgaacctctccgaacaagtcaagggcaaggttacagagttcgatttcaaggagtacatgcgatctaaggctatgtctgtgaacgaggccctcgaccgagcggtgcccttgcgctaccccgagaagattcacgaggccatgcgttactccctgctggccggaggtaagagagtgcgacccatcctgtgtatcgccgcatgtgagctggtgggcgggtcagaggagttggccatgcctacagcctgcgccatggagatcattcacacaatgtctcttattcatgatgacctgccttgcatcgataatgacgacttgcggagaggcaagcctactaaccacaaggtcttcggagagggtaccgcggtcctggctggcgacgctctcttgtcgtttgctttcgaacatatagcagtgtccacaagcaagactgtggagtcggaccgcgtcctgcgagtcgtttccgagctcggtcgagcaattggttctgagggtgtcgccggtggtcaggtagcagacattacttctcagggaaacccatctgtcggcctcgagacactggaatggattcacattcataaaacagccgtcctcctggagtgctccgtcgcttccggcgccattattggtggggcttcggacgatgagattgaacgagttcgaaagtacgcccgatgtgttggactcctgtttcaggttgtcgacgacatcctggacgtgactaagagtagcgaagaacttggcaagaccgccgccaaagacttgctcagtgataaagctacttaccccaagctgatgggactcgaaaaggctaaggagtttgctgacgaactcctgggcaaggccaaggaggaattgtccttttttaaccccaccaaggcggcccccttgctcggattggctgattacatcgctcagcgccagaac

SEQ ID NO: 1771 - DNA, 1686 bp, Artificial Sequence
  GPPS-GES engineered fusion
atggaagaagcgaagtggttcaaccgtggatacatccctaccctggatgaatacttggcaaacggcgttatttccggcggtacttgtatggctttggtccacgcgttctttctgatgggtaaaggagtcatgaaggaaacggaagcaatgatggaaccataccctcgttgctttacatcttccggtaaaatcctccgcctgtgggatgacctcggcacctcccgcgaggaacaggagcgaggcgacgtagcttcctccatcgaatgtctgatgaacgaaaagaacatcgccctcgaagacggagctcgtaaacacgttcgccaactgatcggttccctctggatcgaactcaatggcgaactggtggcacctacgggtctgccgctctctaccatcaaggcatccttcaatctgtcccgcaccgcccaagcaatttaccaacacggtaacgataacacagcgtcatcggtacaagatcatgtgcagtccctgttcttcaacccgatcggcttccaaacccgctccccaaatcatcgtaacgtcacactctccaaccgcggcggcggcggctccatgaaagacgtctcgctgagctcattcgatgcccacgacctcgacttagacaagttccccgaagtcgtccgagacaggctgactcagttcctcgacgcacaagagctaacaattgctgacatcggagcccctgtcactgatgctgttgcccacttgcgctctttcgtgttgaacggaggcaaacgaatcagacccctgtacgcttgggccgggttcctcgccgcgcagggacacaagaactcatccgagaagctggagtcagtgctggacgctgcggcatcgctggagttcattcaggcgtgcgccctgattcatgacgacatcatcgactcgtctgacaccagacgtggtgccccaactgttcatagggcagtggaggctgaccatagagccaacaactttgaaggagatcctgagcactttggcgtttccgtgagcatcttggccggcgatatggccttggtctgggcggaggatatgctccaggatagtggactttccgctgaggctctggcccgaacacgcgatgcctggcgaggtatgcgaaccgaggtaattggtggccagcttctcgatatctacctggagagtcatgccaacgagtccgttgagcttgctgacagcgtgaatcgctttaagacagccgcttacacaatcgcccgtcctctgcacctgggcgcctcgatcgctggtggctcccctcaactgattgacgcccttttgcactacggacacgatatcggcatcgccttccagctgcgagacgacttgctgggcgtttttggcgaccccgccattactggaaagcccgcgggcgacgatattcgtgaaggtaagcgtacagtcctgctagctctagctcttcagcgagctgacaagcagtctcctgaagctgcgaccgcaatcagggctggtgttggcaaggtcacatcccctgaagacatcgctgtgataaccgagcacatccgcgccactggtgccgaagaggaggtggaacagcggatttcacagctgacggagtccggcctcgcccaccttgacgacgttgacattccagacgaggttcgggcccagctgagagccctggcgattcgatccacagagagacgaatg

SEQ ID NO: 1772 - DNA, 1614 bp, Artificial Sequence
  GPPS-GES engineered fusion
atggaagaagcgaagtggttcaaccgtggatacatccctaccctggatgaatacttggcaaacggcgttatttccggcggtacttgtatggctttggtccacgcgttctttctgatgggtaaaggagtcatgaaggaaacggaagcaatgatggaaccataccctcgttgctttacatcttccggtaaaatcctccgcctgtgggatgacctcggcacctcccgcgaggaacaggagcgaggcgacgtagcttcctccatcgaatgtctgatgaacgaaaagaacatcgccctcgaagacggagctcgtaaacacgttcgccaactgatcggttccctctggatcgaactcaatggcgaactggtggcacctacgggtctgccgctctctaccatcaaggcatccttcaatctgtcccgcaccgcccaagcaatttaccaacacggtaacgataacacagcgtcatcggtacaagatcatgtgcagtccctgttcttcaacccgatcggcttccaaacccgctccccaaatcatcgtaacgtcacactctccaaccgcggcggcggcggctccatgctcgctgaagagcagctggatccctttagcctggtcgctgacgaactctccctactggccgaccggctccgatcgatggtggtggcggaggtccccaaactcgcctcggccgccgagtacttctttaagatgggcgtggaaggtaagcgtttccgaccaacggtgctcctgctaatggccaccgccctgaacgttccccttcccagacccgctctcgcagaagttcccgaaaccctctcgaccgaactgcgaactcggcagcagtgtattgccgagatcaccgagatgatccacgtggcctccctgttgcatgatgatgtattggacgatgccgagactcggcggggcattggctctctgaacattatgatgggaaataaggtcgccgttcttgctggggattttctgctatcgcgtgcctgcgtggccctggcctcccttaagaacaccgaggtcgtgtccctgctcgccaccgttgttgagcatttggtcaccggcgagactatgcagatgacatccacttcggagcagagggtatccatggaatactatctccagaagacatactacaagacagcgtctctcatctccaactcatgtaaggctattgcccttctggccggacagacggctgaagtttctatgctggctttcgagtacggcaagaatcttggcctcgccttccagcttattgacgacgtccttgactttaccggcacgtcagcctctctgggcaaaggctccctgagcgacattcgacatggcatcatcacggcaccaattctgttcgccattgaggaatttcctcagcttgacgcggtcgtcaagcgaggactggataaccccgctgatatcgacttggctctcgactatctgggaaagtctcgtggtattcagcgaacacgagagctggcaatgaaacatgcaaacctcgccgccgaggcaattgatagcctgcccgagtcgggtgacgaggatgtactacggagccgtcgagccctcattgatcttacccacagggtcatcacccgtaccaag

SEQ ID NO: 1773 - DNA, 2697 bp, Artificial Sequence
  GPPS-GES engineered fusion
atggcattcaacatgtcccgtttcgtgacaatgccctcccacgttttgccatcgtccttcgtggctccttcccttcaggtgtccagctcaccttgttcctggcgtacacgccctagcccatgtacctcatgccacctctccccctccagctcctccaagccactccttggctcccacgactatagcttgctgaaatctcttacactctctcctcacgctgttaactcggaagctgattcgtccacccgccgtatgaaggaagtgaaagaacgcacctgggaggccttctaccgagcctgggactcacgcgccgcaatggaaatggttgatactgtggagcgccttggcttgagctaccacttcgaggacgaaattaacgctttgctgcaacgcttctgcgactggaacgcgtctgaagatcttttcacgaccgcgctgcgcttccgcttgttgcgacagaacggttttccaacacactcggatgttttcggtaagttcatggataagaacggaaagttcaaggagtcattgaccgaagatatccgcggcatgctgtcattgcacgaagccagccacttgggagccaaaaatgaagaagttctcgcggaagccaaagagttcacccgcattcacctcattcagtcgatgccacacatggagccacatttctcctcgcatgtgggccgcgctctggagctgccacgccacttgcgcatggtacgactggaagcgcgcaactatatcggtgagtattcgcgagagagcaacccaaacctggcttttcttgaattggcgaaactggatttcgatatggttcagagcctccaccagaaagagttggcggaaatcctgcgctggtggaagcagctcggtctggtcgataagctggatttcgcacgcgatcgcccaatggaatgttttctctggaccgttggcatctttccggacccacgtcactcttcctgtcgcatcgaactgactaaggccatcgctatcctgcttgtgatcgatgatatctacgatagctatggctcattggacgaattggcactcttcaccgatgccgtcaagcgttgggatctgggcgcgatggaccagcttcccgaatacatgaaaatctgctacatggcactgtacaacacaaccaacgacattgcctaccgcattttgaaggagcacggctggtccgtaatcgagcacttgaaacgaacgtggatggacatcttcggcgcatttctcgccgaagcatactgttttaaaggcggccacgtgccatcccttgaagaatacctcaccaacgccgtaaccaccggcggtacctacatggctctggtccacgcattcttcctgatgggtcagggagtgacgcgagaaaacatggcaatgctcaagccatatccaaatattttctcatgctcaggcaagatcttgcgcctctgggatgatcttggcaccgcgcgcgaagaacaggagcgcggcgacaacgctagctcaatcgaatgttacaaacgcgaacgcgagatggacacagtccttgaggatgaggcgtgccgtaagcacattcgccagatgattcagtctctctgggtagagctcaacggtgaacttgtagcctcgtctgcgctgccactgagcatcatcaaggccgcattcaacctctcacgcaccgcgcaggtgatctaccagcacggcgatgacaacaaaacttcatccgtcgaagaccacgttcaagccctcctcttccgaccagtatcgtccaacggccatgcacagattacaatgcatggcggcggcggctccatggactttccccaacagctcgaagcctgtgtgaaacaggctaaccaggccctgtccagatttatcgccccccttcccttccagaacactcccgtggtagagactatgcagtacggagccctgctcggcggcaagcgattgcgacccttccttgtgtacgccaccggccatatgttcggcgtttctactaacacgctcgacgccccggctgctgccgtggagtgtattcatgcttacttcctgatccacgatgatctgccagccatggatgacgatgatttgcgtcgaggcctcccgacctgccacgttaagttcggcgaggcaaacgctatcctcgctggcgacgcccttcagacacttgcattctccattctgtcagatgctgatatgcccgaggttagtgatagagatcgtatctcgatgatttctgagctggctagcgcatcgggaattgccggcatgtgcggtggtcaggctcttgatttggatgccgagggcaaacatgtcccgctggacgctttggagaggattcatagacacaagacaggtgctctcatccgcgccgccgtccgactgggcgccttgtccgctggcgacaagggtcgacgagccctcccagtcctcgataagtatgctgaatccattggcttagccttccaggtgcaggacgacattctcgacgtcgtgggcgacacggccaccctcggaaaaagacagggcgctgaccagcaactgggcaagtcgacgtaccccgcgcttctgggcctcgaacaagcccgtaagaaggctagagacctcatcgacgacgcgcgtcagtccctcaagcaactggccgagcagtctttggacactagtgctctcgaagctttggctgactacattatccaacggaacaaa

SEQ ID NO: 1774 - DNA, 2856 bp, Artificial Sequence
  GPPS-GES engineered fusion
atggcattcaacatgtcccgtttcgtgacaatgccctcccacgttttgccatcgtccttcgtggctccttcccttcaggtgtccagctcaccttgttcctggcgtacacgccctagcccatgtacctcatgccacctctccccctccagctcctccaagccactccttggctcccacgactatagcttgctgaaatctcttacactctctcctcacgctgttaactcggaagctgattcgtccacccgccgtatgaaggaagtgaaagaacgcacctgggaggccttctaccgagcctgggactcacgcgccgcaatggaaatggttgatactgtggagcgccttggcttgagctaccacttcgaggacgaaattaacgctttgctgcaacgcttctgcgactggaacgcgtctgaagatcttttcacgaccgcgctgcgcttccgcttgttgcgacagaacggttttccaacacactcggatgttttcggtaagttcatggataagaacggaaagttcaaggagtcattgaccgaagatatccgcggcatgctgtcattgcacgaagccagccacttgggagccaaaaatgaagaagttctcgcggaagccaaagagttcacccgcattcacctcattcagtcgatgccacacatggagccacatttctcctcgcatgtgggccgcgctctggagctgccacgccacttgcgcatggtacgactggaagcgcgcaactatatcggtgagtattcgcgagagagcaacccaaacctggcttttcttgaattggcgaaactggatttcgatatggttcagagcctccaccagaaagagttggcggaaatcctgcgctggtggaagcagctcggtctggtcgataagctggatttcgcacgcgatcgcccaatggaatgttttctctggaccgttggcatctttccggacccacgtcactcttcctgtcgcatcgaactgactaaggccatcgctatcctgcttgtgatcgatgatatctacgatagctatggctcattggacgaattggcactcttcaccgatgccgtcaagcgttgggatctgggcgcgatggaccagcttcccgaatacatgaaaatctgctacatggcactgtacaacacaaccaacgacattgcctaccgcattttgaaggagcacggctggtccgtaatcgagcacttgaaacgaacgtggatggacatcttcggcgcatttctcgccgaagcatactgttttaaaggcggccacgtgccatcccttgaagaatacctcaccaacgccgtaaccaccggcggtacctacatggctctggtccacgcattcttcctgatgggtcagggagtgacgcgagaaaacatggcaatgctcaagccatatccaaatattttctcatgctcaggcaagatcttgcgcctctgggatgatcttggcaccgcgcgcgaagaacaggagcgcggcgacaacgctagctcaatcgaatgttacaaacgcgaacgcgagatggacacagtccttgaggatgaggcgtgccgtaagcacattcgccagatgattcagtctctctgggtagagctcaacggtgaacttgtagcctcgtctgcgctgccactgagcatcatcaaggccgcattcaacctctcacgcaccgcgcaggtgatctaccagcacggcgatgacaacaaaacttcatccgtcgaagaccacgttcaagccctcctcttccgaccagtatcgtccaacggccatgcacagattacaatgcatggcggcggcggctccatggcctctgagaaagagatccgacgggagcggttcctaaatgtgttccccaagttggttgaggagctaaacgcctcgctgctggcgtacggaatgcctaaagaagcttgcgactggtacgctcattccctgaactataatactcctggcggtaagctgaaccggggcctctcggtcgtcgatacttacgccattctgtcgaacaagactgtcgagcagctgggccaggaggagtatgaaaaggtcgcaatccttggatggtgcattgagttgctgcaggcgtattggctggtggctgacgatatgatggacaagagtatcacccgacggggccagccttgttggtacaaggtgccggaagtcggagaaattgcgatttgggacgcttttatgcttgaggcggcgatttacaagctcctcaagtcgcacttcagaaacgagaagtactacattgatatcactgaactctttcacgaagtcacattccagaccgagctgggccagcttatggacctgatcaccgctcccgaggacaaagtcgacctttccaaattttccctcaagaaacactctttcatcgtgacctttaagacagcgtactacagcttttatctgcccgtcgctctcgccatgtacgtggcagggatcaccgacgagaaggatctcaaacaggctcgagatgtgcttatacccctgggagagtacttccagattcaggacgactacctggactgtttcggcacccctgaacagattggcaagatcggaactgacatccaggacaataaatgcagctgggtcattaataaagctttagaactggcctccgccgaacagcggaaaactctggacgagaactacggaaagaaggattccgtcgctgaagctaaatgtaagaagattttcaacgacctgaagatcgagcagctctatcacgagtacgaggagtcaattgccaaagacctcaaggcaaagatctctcaggttgacgagtcccggggttttaaggcggatgttctgaccgctttccttaataaggtatacaagaggagtaaa

SEQ ID NO: 1775 - DNA, 2757 bp, Artificial Sequence
  GPPS-GES engineered fusion
atggcattcaacatgtcccgtttcgtgacaatgccctcccacgttttgccatcgtccttcgtggctccttcccttcaggtgtccagctcaccttgttcctggcgtacacgccctagcccatgtacctcatgccacctctccccctccagctcctccaagccactccttggctcccacgactatagcttgctgaaatctcttacactctctcctcacgctgttaactcggaagctgattcgtccacccgccgtatgaaggaagtgaaagaacgcacctgggaggccttctaccgagcctgggactcacgcgccgcaatggaaatggttgatactgtggagcgccttggcttgagctaccacttcgaggacgaaattaacgctttgctgcaacgcttctgcgactggaacgcgtctgaagatcttttcacgaccgcgctgcgcttccgcttgttgcgacagaacggttttccaacacactcggatgttttcggtaagttcatggataagaacggaaagttcaaggagtcattgaccgaagatatccgcggcatgctgtcattgcacgaagccagccacttgggagccaaaaatgaagaagttctcgcggaagccaaagagttcacccgcattcacctcattcagtcgatgccacacatggagccacatttctcctcgcatgtgggccgcgctctggagctgccacgccacttgcgcatggtacgactggaagcgcgcaactatatcggtgagtattcgcgagagagcaacccaaacctggcttttcttgaattggcgaaactggatttcgatatggttcagagcctccaccagaaagagttggcggaaatcctgcgctggtggaagcagctcggtctggtcgataagctggatttcgcacgcgatcgcccaatggaatgttttctctggaccgttggcatctttccggacccacgtcactcttcctgtcgcatcgaactgactaaggccatcgctatcctgcttgtgatcgatgatatctacgatagctatggctcattggacgaattggcactcttcaccgatgccgtcaagcgttgggatctgggcgcgatggaccagcttcccgaatacatgaaaatctgctacatggcactgtacaacacaaccaacgacattgcctaccgcattttgaaggagcacggctggtccgtaatcgagcacttgaaacgaacgtggatggacatcttcggcgcatttctcgccgaagcatactgttttaaaggcggccacgtgccatcccttgaagaatacctcaccaacgccgtaaccaccggcggtacctacatggctctggtccacgcattcttcctgatgggtcagggagtgacgcgagaaaacatggcaatgctcaagccatatccaaatattttctcatgctcaggcaagatcttgcgcctctgggatgatcttggcaccgcgcgcgaagaacaggagcgcggcgacaacgctagctcaatcgaatgttacaaacgcgaacgcgagatggacacagtccttgaggatgaggcgtgccgtaagcacattcgccagatgattcagtctctctgggtagagctcaacggtgaacttgtagcctcgtctgcgctgccactgagcatcatcaaggccgcattcaacctctcacgcaccgcgcaggtgatctaccagcacggcgatgacaacaaaacttcatccgtcgaagaccacgttcaagccctcctcttccgaccagtatcgtccaacggccatgcacagattacaatgcatggcggcggcggctccatgcttcgctgttctaacacaaatgcccagttggcgaacctctccgaacaagtcaagggcaaggttacagagttcgatttcaaggagtacatgcgatctaaggctatgtctgtgaacgaggccctcgaccgagcggtgcccttgcgctaccccgagaagattcacgaggccatgcgttactccctgctggccggaggtaagagagtgcgacccatcctgtgtatcgccgcatgtgagctggtgggcgggtcagaggagttggccatgcctacagcctgcgccatggagatcattcacacaatgtctcttattcatgatgacctgccttgcatcgataatgacgacttgcggagaggcaagcctactaaccacaaggtcttcggagagggtaccgcggtcctggctggcgacgctctcttgtcgtttgctttcgaacatatagcagtgtccacaagcaagactgtggagtcggaccgcgtcctgcgagtcgtttccgagctcggtcgagcaattggttctgagggtgtcgccggtggtcaggtagcagacattacttctcagggaaacccatctgtcggcctcgagacactggaatggattcacattcataaaacagccgtcctcctggagtgctccgtcgcttccggcgccattattggtggggcttcggacgatgagattgaacgagttcgaaagtacgcccgatgtgttggactcctgtttcaggttgtcgacgacatcctggacgtgactaagagtagcgaagaacttggcaagaccgccgccaaagacttgctcagtgataaagctacttaccccaagctgatgggactcgaaaaggctaaggagtttgctgacgaactcctgggcaaggccaaggaggaattgtccttttttaaccccaccaaggcggcccccttgctcggattggctgattacatcgctcagcgccagaac

SEQ ID NO: 1776 - DNA, 2913 bp, Artificial Sequence
  GPPS-GES engineered fusion
atggcattcaacatgtcccgtttcgtgacaatgccctcccacgttttgccatcgtccttcgtggctccttcccttcaggtgtccagctcaccttgttcctggcgtacacgccctagcccatgtacctcatgccacctctccccctccagctcctccaagccactccttggctcccacgactatagcttgctgaaatctcttacactctctcctcacgctgttaactcggaagctgattcgtccacccgccgtatgaaggaagtgaaagaacgcacctgggaggccttctaccgagcctgggactcacgcgccgcaatggaaatggttgatactgtggagcgccttggcttgagctaccacttcgaggacgaaattaacgctttgctgcaacgcttctgcgactggaacgcgtctgaagatcttttcacgaccgcgctgcgcttccgcttgttgcgacagaacggttttccaacacactcggatgttttcggtaagttcatggataagaacggaaagttcaaggagtcattgaccgaagatatccgcggcatgctgtcattgcacgaagccagccacttgggagccaaaaatgaagaagttctcgcggaagccaaagagttcacccgcattcacctcattcagtcgatgccacacatggagccacatttctcctcgcatgtgggccgcgctctggagctgccacgccacttgcgcatggtacgactggaagcgcgcaactatatcggtgagtattcgcgagagagcaacccaaacctggcttttcttgaattggcgaaactggatttcgatatggttcagagcctccaccagaaagagttggcggaaatcctgcgctggtggaagcagctcggtctggtcgataagctggatttcgcacgcgatcgcccaatggaatgttttctctggaccgttggcatctttccggacccacgtcactcttcctgtcgcatcgaactgactaaggccatcgctatcctgcttgtgatcgatgatatctacgatagctatggctcattggacgaattggcactcttcaccgatgccgtcaagcgttgggatctgggcgcgatggaccagcttcccgaatacatgaaaatctgctacatggcactgtacaacacaaccaacgacattgcctaccgcattttgaaggagcacggctggtccgtaatcgagcacttgaaacgaacgtggatggacatcttcggcgcatttctcgccgaagcatactgttttaaaggcggccacgtgccatcccttgaagaatacctcaccaacgccgtaaccaccggcggtacctacatggctctggtccacgcattcttcctgatgggtcagggagtgacgcgagaaaacatggcaatgctcaagccatatccaaatattttctcatgctcaggcaagatcttgcgcctctgggatgatcttggcaccgcgcgcgaagaacaggagcgcggcgacaacgctagctcaatcgaatgttacaaacgcgaacgcgagatggacacagtccttgaggatgaggcgtgccgtaagcacattcgccagatgattcagtctctctgggtagagctcaacggtgaacttgtagcctcgtctgcgctgccactgagcatcatcaaggccgcattcaacctctcacgcaccgcgcaggtgatctaccagcacggcgatgacaacaaaacttcatccgtcgaagaccacgttcaagccctcctcttccgaccagtatcgtccaacggccatgcacagattacaatgcatggcggcggcggctccatgaaagacgtctcgctgagctcattcgatgcccacgacctcgacttagacaagttccccgaagtcgtccgagacaggctgactcagttcctcgacgcacaagagctaacaattgctgacatcggagcccctgtcactgatgctgttgcccacttgcgctctttcgtgttgaacggaggcaaacgaatcagacccctgtacgcttgggccgggttcctcgccgcgcagggacacaagaactcatccgagaagctggagtcagtgctggacgctgcggcatcgctggagttcattcaggcgtgcgccctgattcatgacgacatcatcgactcgtctgacaccagacgtggtgccccaactgttcatagggcagtggaggctgaccatagagccaacaactttgaaggagatcctgagcactttggcgtttccgtgagcatcttggccggcgatatggccttggtctgggcggaggatatgctccaggatagtggactttccgctgaggctctggcccgaacacgcgatgcctggcgaggtatgcgaaccgaggtaattggtggccagcttctcgatatctacctggagagtcatgccaacgagtccgttgagcttgctgacagcgtgaatcgctttaagacagccgcttacacaatcgcccgtcctctgcacctgggcgcctcgatcgctggtggctcccctcaactgattgacgcccttttgcactacggacacgatatcggcatcgccttccagctgcgagacgacttgctgggcgtttttggcgaccccgccattactggaaagcccgcgggcgacgatattcgtgaaggtaagcgtacagtcctgctagctctagctcttcagcgagctgacaagcagtctcctgaagctgcgaccgcaatcagggctggtgttggcaaggtcacatcccctgaagacatcgctgtgataaccgagcacatccgcgccactggtgccgaagaggaggtggaacagcggatttcacagctgacggagtccggcctcgcccaccttgacgacgttgacattccagacgaggttcgggcccagctgagagccctggcgattcgatccacagagagacgaatg

SEQ ID NO: 1777 - DNA, 2841 bp, Artificial Sequence
  GPPS-GES engineered fusion
atggcattcaacatgtcccgtttcgtgacaatgccctcccacgttttgccatcgtccttcgtggctccttcccttcaggtgtccagctcaccttgttcctggcgtacacgccctagcccatgtacctcatgccacctctccccctccagctcctccaagccactccttggctcccacgactatagcttgctgaaatctcttacactctctcctcacgctgttaactcggaagctgattcgtccacccgccgtatgaaggaagtgaaagaacgcacctgggaggccttctaccgagcctgggactcacgcgccgcaatggaaatggttgatactgtggagcgccttggcttgagctaccacttcgaggacgaaattaacgctttgctgcaacgcttctgcgactggaacgcgtctgaagatcttttcacgaccgcgctgcgcttccgcttgttgcgacagaacggttttccaacacactcggatgttttcggtaagttcatggataagaacggaaagttcaaggagtcattgaccgaagatatccgcggcatgctgtcattgcacgaagccagccacttgggagccaaaaatgaagaagttctcgcggaagccaaagagttcacccgcattcacctcattcagtcgatgccacacatggagccacatttctcctcgcatgtgggccgcgctctggagctgccacgccacttgcgcatggtacgactggaagcgcgcaactatatcggtgagtattcgcgagagagcaacccaaacctggcttttcttgaattggcgaaactggatttcgatatggttcagagcctccaccagaaagagttggcggaaatcctgcgctggtggaagcagctcggtctggtcgataagctggatttcgcacgcgatcgcccaatggaatgttttctctggaccgttggcatctttccggacccacgtcactcttcctgtcgcatcgaactgactaaggccatcgctatcctgcttgtgatcgatgatatctacgatagctatggctcattggacgaattggcactcttcaccgatgccgtcaagcgttgggatctgggcgcgatggaccagcttcccgaatacatgaaaatctgctacatggcactgtacaacacaaccaacgacattgcctaccgcattttgaaggagcacggctggtccgtaatcgagcacttgaaacgaacgtggatggacatcttcggcgcatttctcgccgaagcatactgttttaaaggcggccacgtgccatcccttgaagaatacctcaccaacgccgtaaccaccggcggtacctacatggctctggtccacgcattcttcctgatgggtcagggagtgacgcgagaaaacatggcaatgctcaagccatatccaaatattttctcatgctcaggcaagatcttgcgcctctgggatgatcttggcaccgcgcgcgaagaacaggagcgcggcgacaacgctagctcaatcgaatgttacaaacgcgaacgcgagatggacacagtccttgaggatgaggcgtgccgtaagcacattcgccagatgattcagtctctctgggtagagctcaacggtgaacttgtagcctcgtctgcgctgccactgagcatcatcaaggccgcattcaacctctcacgcaccgcgcaggtgatctaccagcacggcgatgacaacaaaacttcatccgtcgaagaccacgttcaagccctcctcttccgaccagtatcgtccaacggccatgcacagattacaatgcatggcggcggcggctccatgctcgctgaagagcagctggatccctttagcctggtcgctgacgaactctccctactggccgaccggctccgatcgatggtggtggcggaggtccccaaactcgcctcggccgccgagtacttctttaagatgggcgtggaaggtaagcgtttccgaccaacggtgctcctgctaatggccaccgccctgaacgttccccttcccagacccgctctcgcagaagttcccgaaaccctctcgaccgaactgcgaactcggcagcagtgtattgccgagatcaccgagatgatccacgtggcctccctgttgcatgatgatgtattggacgatgccgagactcggcggggcattggctctctgaacattatgatgggaaataaggtcgccgttcttgctggggattttctgctatcgcgtgcctgcgtggccctggcctcccttaagaacaccgaggtcgtgtccctgctcgccaccgttgttgagcatttggtcaccggcgagactatgcagatgacatccacttcggagcagagggtatccatggaatactatctccagaagacatactacaagacagcgtctctcatctccaactcatgtaaggctattgcccttctggccggacagacggctgaagtttctatgctggctttcgagtacggcaagaatcttggcctcgccttccagcttattgacgacgtccttgactttaccggcacgtcagcctctctgggcaaaggctccctgagcgacattcgacatggcatcatcacggcaccaattctgttcgccattgaggaatttcctcagcttgacgcggtcgtcaagcgaggactggataaccccgctgatatcgacttggctctcgactatctgggaaagtctcgtggtattcagcgaacacgagagctggcaatgaaacatgcaaacctcgccgccgaggcaattgatagcctgcccgagtcgggtgacgaggatgtactacggagccgtcgagccctcattgatcttacccacagggtcatcacccgtaccaag

SEQ ID NO: 1778 - DNA, 1173 bp, Phialophora attae
atggctggcgggaaaaaggcgctgattttcggagcttcaggcgtaaccgggtggtcgtttgtcaacgaaatcctgaacgattacccggacaagggtatctgggatcgggtgtacgcacttacaaatcgtccgctgacgcgcagtgcgagcaaatggccggatgatccaagattgcgtatagtgagcggtatcgacttgctgaagggttctcaagaggatctagagggggaactccgctcaaatgtggaagatatagaacagataacgcacgtgtactatttagcctataaagcgtcaaaagacgtagatcaagaattgaaagatgcggtggcgatgtttcaacgttcgacgatcgccctggataaacttagccccgcacttgaatttgtagtgcttcaaaccggcgctaaaatgtatggttgtcatcttctggataaccatccgaccgattatatgagcgtaccgcataaagaaagcaccccgcgcctgaaagcgccctaccacgaccaactgttttaccatcctcaactggattgggtcacggagtatgcgcgcgggaagaaatggaactggtgcgatactcgtccagatattataattggcttcgtaccgaaccagaatttctatagcttagctacgtcactggccgttttcttatccctatatcgagaggtcgaaggtgcgggtgccgaatgcatgttcccggggaccagcaaatcgtgggtggcaaaatctaatgactcatccagcgatatgattgcccgccagaccctgcatctgagcctaaccctgcccatggaccgcaaaggcgaaggttttaatgtggccgacgcacgccacccagagaccttcgaaagcaaatggccgcagatttgcgcctactttggcctgaaagggattggcccggcaaaagaacctagcaatatccgtacttatattcgcgaacattttgacacgtggcgcgccatcgaaaaaaaacatggattacagtctggcatcgcagattcagatctgacctttgaaggctttgaatatttcctgctggcgcagttcgattttgatcgtcaatacgatatgacgaagatgtatgacaccggctttacggaagaacgtacagtgatggaagcttggggaggcgtttttgatcgcatgagggcagcgaaactgatcccg

SEQ ID NO: 1779 - DNA, 1170 bp, Tarenaya spinosa
atgtgtggctggtggggcgcgggagcaattggtgcagccaaaaaaaaactggaggaagatgaaccgcccccgcgtagctatcagtcagtggggctcattattggtgtgacgggtatcgtaggcaactctctggcggagattctgccgttgtctgatacaccaggcgggccctggaaagtatacggcgttgcgcgacgtccgcagccatcgtggaacgccgatcaccctattgattacatccaatgcgacgtgtcagatacggatgatgtccgttgtaaattatcaccgcttactgatgtgacccacattttctttgttgcgtggactaaccgtggcagcgaacccgaaaactgtgaaacgaatgcgggtatgctgcgcaacgtcctgcgggcgattgtgccacacgcgccgaacttgcgccatgtatgctccgcagattggtggcgtagcattaccagcgatctccgccagccgcggcgcgtgctgccgcgctcagccattcacggtggctcaaccaaagttaccgattcagagctgcttctgcacccgggcgggtgtcctgtgcgtgggggtcgagaggagcgtcgtttagatttagtttgtaccccgaccgaacatgacctgtgggtattagcgttacagtcagatgagtatgggggatattccctgtgtatccgttcgaatctgcaggcccgcggcatcagcattgcgatccctcggaaacaagactgtgtggggcgcatccgtggcttcttcggctgtggctttgattcccgcgcggcagatctgggttcaggcgatccctacgcaggtaacgaggcgtttaactgctcgaatggtgacgttttcaaatggaaacacatgtggaaagtgttagcggaacaatttggtatcgaagagtttggcttcgaagaaggcaagaatgttggtcttggtaaaatgatggaaggcaaagaacgtgtctgggaagaaatcgtcaaagagaatcagctgaaaaaaaccaagatggaagaagtgggtgtgtggtggtttgctgacgtgatcctgggtgtggaaggcatgattgattccatgaataaaagcaaggaacacggtttccttggttttaggaactcgaagaacagttttatttcatggattgataaatataaggcttacaaaattgtgccc

SEQ ID NO: 1780 - DNA, 846 bp, Trifolium pratense
atgaagaaactcattgccaaagtgcgcaagaaagtcgctgaacacacaagtattagccttgaatcttctaaagaaaacgaaaccaccgagcccaacggcggcactgagaacaaataccccaccatggatgaaatctggtatattaacgttgtgcgtcgtggagaccagtcgcaaagcccgttcaggtcgcagagcgaaagtcagtctggcacgcagactctcttgtgcgacctcgatgaaaaaaaaccgaagaaaaaaaataaaaccagctttcatctgagccatatcattgcgtttgaactcgtttgtagtcagaccagtagtcacatatggattttgactcttcaattcgatgagtatgtagttggaaccctgtgcgtttatgcggcaatctgtaaacatggaggcgtcccactgatttttcccggcaccaaaggggcgtgggaaaactattacatggcttcggatgctgacctgatcgccgagcaacacatctgggttgccgtcgatccgtacgccaaaaatgaagcttttaactgcagcaacggcgatgtgttcatgtggaaacaactatggaaggtactggcggaacagtttgggatagaggagtatggatatgaggagggctcatcattgaaactggcggaactgatgaaagataagggaccggtgtgggatgagatagttaaagtgaatgagctgcagccgacaaaactagaagaggtgggcgagtggtggattaccgacgcgtcgttcggccttgagaatatcgtagatagcatgaacaaagccaaagaacacggtttcctcggtagcgaaattgtacgaattctgtctctcgaccgc

SEQ ID NO: 1781 - DNA, 1011 bp, Oryza glumipatula
atgctaccgatgagcatgagctggtggtgggccggcgcgatcggcgccgcgcgcaaacgccacgatggcggaggaggagagcaacaaccaccgttccgaagtgttgcactggttgtaggtagcacgggcatcgtaggtacgtccctagtcgacattctgcccttaccggatacgccgggtggtccgtggaaagtttatgcgttatcacgtcgtcctccgccgccgtggtctccgccgccgcctgcagcggttacacacctgtgcgtggatttagcggatgccgcggccgtggcagaagcgctggcgcctctaaccgacataacccacgtgttttacgttgcgctggcggcgccgcacttggcggaggcccgttctcgtgaagcgaacgcgggcatgctacgcaacgttctggcggcggtcgtcccgacttgcccggcgctagcccatgttgcgctccagacaggctctaagcactacattggcccaccggaatccattggtaagttagcggttgaaacgccattctcggaagatatgccgcgccatgattaccccaacttctattacgatcaggaagacgtgctatttgatgcggtgaccagctccagtagttcgagttctcgccgtgcggcagcggtaacgtgtagcggcttaggcaatagtggtaccgcagcgtgcggcactagtggctttggcagtagcggaactaccgggtgcggcgggtcgtcctgtttgggcaatagtggcacgacagccggatgcggaggaagctcatgccttggaaatagtggcactaccggctgcggcggcagctcatgcttaggctctagtggaacagccggctgtggcggctattcatcctctagtcatcgcgccgccttactgatggaattgcacgagagtagctcatcggcggcgcgcaaacgcactgaggaagatatggcgttcctgctggagaccatgttggtgggcgaactccacagcatcgggtgctcaacgtgcttcgacgtg

SEQ ID NO: 1782 - DNA, 1182 bp, Triticum aestivum
atgatgaaatggtggtgggcaggggcgttcggtgcctttaaaaaacgtcgggcctcgagccgcgcgcgagcggcagccgaagcgccgcagagtaacgtggcactcgtggtagggagcaccggcatcgtaggagccgcactgattgacattctgccactgcgagatacccctggcggcccgtggaaggtgtatgcattgtcccgtcgtccgcttccgccgtggtcggcgccactcccgccagacgtgttccaccaccacttggaccttgcagacccggcagcggttgctgacgccttagctcccctcacagacgtcacccacgtgttctacgttgcctgggaccctcgtccgacccatgcggagggtcgcgaagcgaacggcgcgatgctccggaatgtgctgtccgctctggtgccgaactgcccgggactgctgcacgtctgtttacagactgggcgaaagcattacgtggatccgttcgaaccgcttacggatgtaccgttagccctgcgcccgtactcagaggatttgcctcgtcttgactatcccgatttggaagatgtgttactggacggtctcgccagcaacaacagagtgacctggtccgttcatcgcccgaccacaatattcggtttctctccccgttcagcgcgcaatgtggtggccagcttatgcgtgtacgccgcgatttgcggcaaagaaggattagtccttcgatggcctgggagccgtgttgcctgggaggggttcagtgatgcgagtgacgccgaactcgtagccgagcacgcgctttgggcggcaatggaacccaacggtcgtaacgaaccatttaactgttccaatggagacttatttaaatggcagcagctgtggccgatcctggcctctcagttcggagtgaagtggacaggttaccagggcgaggatcagcgtttcatgctggaggaggccatggcaggtaaagaaggtgtctggtccgaaattgtgaatgagaacggactagtggaaaccgaactcaacgacattacgaattggttttgcgtggatgcaatggttaatgttgaacgcgaaaacctggacacgatgaataaaagcaaagaatatggtttttttggatttcgtaacaccgtgcgatcatttaatacctggattaataagatgaaagtagataaaattgtgccg

SEQ ID NO: 1783 - DNA, 1242 bp, Oryza glumipatula
atgaatgatatgtcgtggtggtgggcaggcgctatcggcggtgtccgcaaacgtcatggcgagcatgcgggggacgcctctcgcccctttcagtcagtagcactggttgtgggcagtaccgttatcgtgggaacgtcactcgttgatatcctccccttacccgatacgccgggtggcccgtggaaagtttatgctgtttcgcggcgacctttgccgccgtggagcccgccgcctagtccggcggttactcacctttgtgtggacctggccgacccagcggctgtgagcgccgccctggctccattaactgatattacacacgtgttctatgtagcgtgggcaccgcacttcgtagaagaagaccagaaccgcgaagcgaacagccggatgctgcgtaacgttcttagcgcggttgtgccgaattgtccggcgctggttcatgtgagtgttcaaaccggctccaaacattacattggtccgccggaaagcattggtaaatttacgattgagacaccgttctccgaagacatgccgcgtctggataactgcccgaacctgtactatgaccaggaagatgcgttgttcgatgcagtttctcgtagccgccgaagaggagccgcagttattagctggtcagtacatagaccttcactggtatttggcttcagcccgcgtagcgcgatgaacgtggtatgcaccctctgcgtttacgcagccatttgccgtaaagagggaggccgtaaattgcgctggccgggctcactgggcgcctgggaaggttttagtaacgcgagcgacgcggaccttgttgcggagcagcatatctgggcagcggtagacccagcggcacgcaatgaagcctataactattcgaacggagatgtctacaaatggaaacagctctggcccgtgctcgcgggtcgtttcggcatggagtggtcaggatacgaaggggaagagtcacgagtgtctcttactgaggcaatggccggtaaggaagccgcgtgggccgagattgtgcgcgaggagggtttagtggccgcagcggaactagaccaggttgcgaactggtggtttgtggatgccctcttcatggataagtgggagttcctggataccatgaacaaatcgaaggaacatggcttcttaggtttccgtaacaccgtgaaaagcttcggcacctggattgataaactgcgtttatacaagatcgtgccgtcatgtcgcattgtcagctccctt

SEQ ID NO: 1784 - DNA, 1203 bp, Madurella mycetomatis
atgccgagcgccgtagttgttggcgcgaccggtatcctgggccgagaaatcgtgaaacgattagcgcatagaccggatgaatggaaaaccgtatacgcgctgtcccgtagtaaaaaggatgagtatccgccaaatgtgacccataatcatgtggatctggtacgcagtgctgaccagatggcccagcagctgaaaggcattgaggcggaatatgtgtttttcgctgcatacctgcagaaaaacaccgaagaggaaaattggcaaattaatggggatatgctagataactttctcaaagccctagagatcaccggcgcggttaataaaatcaaacgtattcttctggtaaccggttgcaaacagtatggcgttcatctgggtcaagccaagaatccgatggttgaaaccgattcgtggctccgtgatgatccgttcccacctaatttttactacagacaacaagatattttaaaatcgttttgtgagaaacatcaagcaatctcctgggtcgtaacctaccctaacgatgtaatcggctttgcaaacggtaactttatgaacttggcagaaggcctgggcatctatgcagtcgtgagtaaagaattgggacaggatctggttttcccgggctctgaaaccttttactcgcgcttcgacagctttacctcgtcgaaactacacgcagaattctgtgaatgggcgattcgtgaaccacgtgcggcgaatcaggcttttaacgtagtgaacggtgatgtgcagacttggcaggatttatggccgcgcttggcccgccgtttcggactcaaggttaaagcagatcagttcgcaggtgatactggccttagctccaagacacgtctaggtgcccagcctcctatatcggtgttcgctgaagaagcgggcctggcaggacgtattccaccctcagaactggaacaacgtattagccttgtgaaatggagccaacaggaaaacgtgcagaaggcctggcgccggctggccgagcgggaaaaattgcaggaagacgccctggaaaaaggcacctgggcgtttattgattttgtgctgggccgcaactatgatattgtggtatcaatgtcgaaggcgcgcgaagccggctggacgggctatcaggacacttggaaatcgttgtctgatgttttcggggaactggaagcggcgtctgttctcccaaagattcac

SEQ ID NO: 1785 - DNA, 732 bp, Phaedon cochleariae
atgcagccatatacctttccggacgacttcgtgttttgcgatctggaatcgcccgatctgtcaacgtgtctacgagataagctacagaattggacgacaatgttaggtacgcggggtatcaaccaccctattcgtttcacactggaacccatggtcattgatttctgggtgctgaacatgaacctgaattttttgaatagtactgaatacctgtggaattgcacttttagccagttttggaattcgaccgtcatttctgccagctacaaccccgaaaactacacgctggtgtatacgtcatactaccctcatatcattgagcatggtcgatatcagatgtttggcaccgtatcttttgaagacggcagtgtcgacgcaatttacggaaacggtccgtacgataagcatatttacgggctgaaccttactcacaagatcacctttgtgccagtgctgcgcgaacatggcgtggaatacctacaagtgtcccgctatgaattggacagcgatggctttcgcgatacctccttgcagtggcataatttgtacaacggcgataccattcgcggtaaccgcacggtgacccgtttagcacacaacgcgatggcattaggcggtgccctggcgaaaccgttcacggacatgaccattgccatgtttcgtttatacaccgagaatttgattagcagcgtgccgagacgccagctccgccgccatttttcgcgtcatccc

SEQ ID NO: 1786 - DNA, 1116 bp, Glycine max
atgtcgaaattaaatgaagcgccgcagtcggttgcacttgtgctgggcgtaaccggcattgttggcaatagcctggcccagatcttgcctctgagtaacactcgcggtggcccgtggaaggtttacggcgtcgcacgtcggactcaaccctcgtggaacgcgttgaataccgtacattatatccagtgcgatatatcggatcagaacgatgcagaatccaagctcagcagcctcacagatgtgacccacgttttctacgtgtgttgggcgcgccgtccgaccgaagcacagaactgtcaggtgaacggagcgatgcttcgcaacgtgcttcgcgccgtaattccgaacgcccctaacctacgccatgtatcgctgcagacgggcaccaaacattatctgggtccctttgaactgctgggtaaaattgaagtggcgcacgatccgccgtttaccgaggatctgcctcgtctggatgcacccaatttctattacacgcaggaagatatcctgtttgaggaagtacgcaaaaaaggtctgacccttacctggttcgttaatcgaccgcattttatttttggtttttcgccgtatagcctgatgaacttagtgggtaccctctgtgtgtacgccgcgatctgcaagcacgaaggggtaccgttgtggtttccgggaactaaagcggtctgggaatgttacaacacggcgtcagatgcggatctgattgctgagcagcacatttggggggctgtggatccgcgtgcgaaaaatgaggcctttaactgcagtaatggcgatgtttttaagtggaaacacgtttggaaagtgttggccgagcgttttggcattagggaatacggcttcctggagggtgaagacctgcgcctgtcagaaatgatgaaagagaagggcgccgaagaaattgtgaaaaaaaacggcctgcagcggaccaaactggaagatgtgggcgattggtggttcgcggacctgatcctccgcatggaagcggttctcgatagcatgaacaaagcgcgcgaacacggtttctttggctttcgtgacagtaaaaaatcgtttatgaattggattgacaaaacaaaagcgtgtaagattgtgccg

SEQ ID NO: 1787 - DNA, 1389 bp, Triticum aestivum
atgtcgctgtcgggccacaacgatgttctgttgtgccgcgagaccgcagcgcgcagcagtccgagcgtggcggccttctcactgagtcagcaggaagggcgtacgcgctctctgctgcttccgccgaccgccggccgcagcacccaggcgcccttgacagttacggtgacggccgcaaccccgccgagcagccgtgacgaacttgtggtgggcggccgcgggcgccgtcgccaggagactcccggtcgccagcgtcgtcggtctcgcgcacgcttgctagaacggcgcccaaggcgtcgtatccacggccatcgccgtcacattgcgccgcgccatccgccggctccgcgtcaccctcgccgcgcactggagggtgtgcgcgccgtgagccgccgcgcactgccgccctggaccccgcctcccactcctgctgttactcacttacgtgttgacctcgcagatccagcggccgttgcggaggcgctcgccccgcttaccgacatcacgcatgtgttttacgcggcttggagctctcaccgcactgaagccgaaaaccgcgaagccaacgccgctatgctgcgcaatgttctgtcagtggtcgtgcccggctgcccggccttggcgcatgtgtgcctccagacgggtcgtaaacattatgtcgcgccgtttgaaagcatcggcaaaatccctggagtgccagatcccccatacaccgaagatatgccgcgcctggattgccctaacttttactatgaccaagaagatgtgttgttcgatgaagtttcacgacgcgatggtgcggtttcgtggtcagtgcatcgcccgacactaattttcggcttttctccgcgtagtgctatgaacgtggtgggaagcctgtgcgtctatgcggctatctgttgcaaggagggtgcgaccccgcgttggccggggtctcgcgtagcctgggaaggcttcaccgacgcgagtgacgcagacctcgtcgcggaacatgagatttgggcggcggtggaccctttcaccaagaacgaggcattcaattgttcaaatggcgatgtgtttaaatggaaacagctgtggccgatgctggcggatcactttggtctagaatgggcgggctacgagggggaagacggtcgatttatcattgcggatgccatggcccggaaggaagcggtgtgggccgaaatcgtgcaggaaaatgagcttgtgaccactgagctgaaagagatcactaactggtggttcgttgatgcggttttaaatttcgaagtcgaacatcttgattcaatgaataaaagcaaagaacatggttttttgggttttcgtaacacggccaacagctttaacgcttggataggaaaacttaaggccagtaagattgtccca

SEQ ID NO: 1788 - DNA, 1167 bp, Olea europaea
atgtcctggtggtcgacccgcgccattggggcggcaaaaaaaaagttcgaggaagatgaggcgccgattaaacatcaatccgtcgcacttgtcattggcgtgactggtattgtaggcaattcgcttgcggaaattctgcctttggcggataccccgggcggcccctggaaggtctatggcgtggcacgacgcccccagccgtcgtggagcgaggacaatccgattcagtacattcgctgcgatatatcggatcacgaagatgcgcaagccaaactgtctcctcttaccgacgtgacgcatatcttctatgtgacctggaccaataaatctacggaagctgaaaactgcgaagcgaacggtaaaatgtttaaaaacgtcctggaggccgtcataagcaattgtccgaaccttaagcacatctgcctgcaaactggccgtaagcattacgtcggcccttttgagtcattcggtaagattaaatttcatgataccccgttccacgaggatctgccgcgcctggactgcccaaacttttactacaccatggaggatattttgtttgaagaagtggaaaaacgcgagggcttaacctggtctatccaccgccccggcctcatcttcggtttcagtcctttttccatgatgaatttggtgggcaccctgtgtgtgtatgctgcaatttgtaaacatgaaggaatgccacttcgttttcccggctctgaggtagtgtgggatggatattatgattgtagcgacgccgacctgattgccgaacaccagatttgggccgccgtcgatccatatgcgcgcaacgaagcctttaacattagcaacggtgatgttttcaaatggaaacatttctggcgcattttagcggaacagttcggggtggaatatgaagaatttgaagaaggtcagaacttaacgctgctcgcgatgatgaaagataagggtaaagtctgggatgaaattgtgcgtgaaaacggcctgactccgacaaaactggaggatgtgggggtctggtggcttgccgataccatgctgagtttaaaatgtcttctggatactatgaacaaatcaaaagaacacggttttctggggttccgcaacagcaaaaattcatttattagctggattgataaactgaaggcgtataaaatcgtgcct

SEQ ID NO: 1789 - DNA, 1170 bp, Camptotheca acuminata
atgtcgtggtggtgggcgggtgcgatcggcgcagcgaaaaaaaaatttgaggaagacggcggtccgaaggtctttcagagtgtaggtttaatcgtcggcgtaacaggtattgtgggaaattccctcgcggaaatactgccgctgagcgatacccccggagggccgtggaaagtttacggcgttgcccgccgcacgcgcccgccctggaatgttgatcaccctgtggagtacattcagtgcgacatcagcgacgcggatgacgccctcgccaaactaagtccattaaccgacctgacccatattttctacgtgacttgggcgaaccgttcgaccgaactcgaaaactgtgaatcgaacgggacgatgctccgcaacgtactgcgtgctgtaattcctaatgcgcctaatctgagccatatctgtcttcagacaggcaccaaacattacattggtccgttcgaatcctttggtaaggtacaaccacacgaaccgccgtttactgaagatatgcctcgccttgacgccccgaatttttattatacattggaagatgtgttgttcgaggaagctgcgaaaaaggaaggtctgacctggactattcatcgtccgcaggttattttcggctttagcccgtacagcatgatgaacattattggcaccttatgcgtgtacgcggccatctgtaaacacgaaaacactccgctcaaattccctggaagcaagacggcgtggaactgttattctaatgcctcggatgcggatctcattgcggaacatcaaatctgggctgtggtggatccttatgcaaagaatgaagcgtttaattgcagcaacggcgatgtgtttaaatggaaacacctgtggaaggttctggcggaacagttcgatgtcgactatgtggagtgcgatgaatcagaaaaacctgttagcttagaggaaatgatgaaggaaaagggtccggtttgggatgaaatcgttaaagaacgagaattggtgccgaccaaacttgaagaagtcggtatgtggtggtttgttgatgtgatctttgctggtgaagccatgctggatagcatgaataaatcgaaagaacatggttttagcggttttcgtaattcgaaaaatagtttcatctcgtggatcgataaggtcaaagattataagattgtgcct

SEQ ID NO: 1790 - DNA, 1041 bp, Musa acuminata
atgagctggtggtgggcgggcgccattggtgcggcgaaaaaaaaaaccacgggcgatgatgcagacgcaccggccgcccgctaccagtctgtggcgctggttgttggtgcgaccggcatcgtaggctcgagtctgtacgacattttgccattagcggatacccccggcggaccgtggaaactgtctcctctgggtgatgtgactcacattttctatgcggcctggtgccgtcgctctaccgcggccgaaactcgcgcaaccaatgccgcgatgctgcgcaacgtgttagatgcagttctgcctgcggcgccgaatctccagcatgtgtgcctgcagacaggtcgtaatcactatctgggcccttacggcccggcaggtggggtagtggcggaagtgggaccgcgccatgatcccccgcatgacccgccttttccggaaaacaccccgcgcttagcgattccgaacttctactatgaactggaagatgtacttctggaagaattggcaaaaaaagaacgcgcagtgacctggagcgtgcatcgcccgacaacaatttttggctttagcccgtgttccctgatgaatctggtgtgcagcctgtgcgtttacgcgtcgatatgtcgtaaggaaggtgttccgctgcggtggtttggtagcgaggaggcgtggtatggctttagcgatgccagtgatgccgacttagtggccgagcaccagatctgggcagcggtggatccgtatgcaaaaaatgaagcgtttaattgtagtaacggtgatgtgttcaaatggaaacatctgtggcctgacgccatgaagggcaaggaggctgtgtgggaagacattgtgcgcgaaaatgaactggttcccacggctttagatgaagtgggtcattggtggtacgcagatgcggttctgggcttggaattcgagcatttagacaatatgaataaatcgaaagaacatggtttcctaggttttcgcaatagcgtgacctcatttaatacctggatcgacaaactccgcgcgtacaaagttgttcca

SEQ ID NO: 1791 - DNA, 1161 bp, Arabidopsis thaliana
atgagctggtggtgggcgggcgccattggcgccgccaaaaaactggatgaagacgagccctcgcaaagcttcgaatccgtagcactgatcattggtgtaacaggtatcgtgggcaatagcttggccgagattctgccgctgtctgacacgccaggtggtccctggaaagtctatggagttgcccgccgtccgcgtcctacctggaacgcggatcacccgattgattacattcaatgcgatgtgtcagatgctgaagacacccgctccaaactgtcgccgctgactgacgttacccatgtgttttatgtgacctggacgaatcgtgaaagcgaatctgaaaattgtgaagcgaatggcagcatgttgcgtaatgttcttcaggccatcattccttatgcaccgaatttacgacatgtttgcttgcagacgggcacaaaacactatctgggtccctttaccaacgtcgatggacctagacacgatcctccgttcacggaagatatgccacgtctgcagatacagaacttctactacactcaggaggatattcttttcgaggagatcaagaagattgaaactgttacctggtcaattcaccgcccgaacatgatttttgggttttctccgtattcgctgatgaacatcgtaggaacgttgtgcgtgtacgctgcgatctgtaaacatgagggcagcccattactgtttccagggtccaaaaaagcatgggaaggtttcatgaccgcaagcgacgccgatctcattgccgaacagcaaatttgggcagccgtggacccctacgcgaaaaatgaagcgttcaattgcaacaatgctgatatcttcaaatggaaacacctttggaagattctggccgaacagttcggcattgaggaatatggtttcgaagagggcaaaaaccttggactggtggaaatgatgaaaggcaaagagcgtgtctgggaagaaatggtaaaagaaaaccaattacaggaaaagaaattggaagaggttggagtgtggtggtttgcggatgtgattctgggcgtcgagggaatgattgatagcatgaacaaaagcaaggaatatgggttcctcggctttcgcaattcaaataacagttttatctcgtggatcgataagtacaaggcctttaaaattgtgcca

SEQ ID NO: 1792 - DNA, 1167 bp, Digitalis lanata
atgtcttggtggtgggcgggtgccattggcgccgccaaaaaacgcctggaggaagatgatgcccagcccaaacatagcagtgttgcgcttattgtgggcgtgaccgggatcatcggtaactccctggccgaaatcctgcctctcgccgatacgccagggggtccgtggaaggtatatggagtggcgcgccgtacacgacctgcatggcatgaagataacccgataaactacgttcagtgtgatatctcggatcctgatgatagccaggccaaactgagccctctgacagacgttacccatgtcttctacgtcacctgggcgaataggagcaccgaacaggagaactgcgaagccaactcaaaaatgttccgtaatgtgctggatgctgttatcccgaactgcccgaatctaaaacacatttcattgcagacgggtcgtaaacattatatgggcccgtttgaaagctacggcaaaattgaaagtcacgatccgccatacacggaggatctgccacgcctgaaatacatgaacttttattacgatctggaagatatcatgctggaagaagttgagaaaaaggaaggtttgacgtggtctgtccaccgccctggcaacatctttggttttagcccttacagcatgatgaacttggtgggcaccctgtgcgtttatgcggccatctgcaaacacgaaggtaaagttctgcgcttcactggatgcaaggcggcgtgggatggctatagcgactgttctgacgcggatttgattgccgagcatcacatttgggcagcagttgatccctatgccaaaaatgaagcgttcaatgtcagcaatggtgacgtctttaaatggaaacacttttggaaagtattagccgaacagttcggcgtgggttgcggtgaatacgaagagggcgtcgatcttaaactgcaagatctgatgaaaggtaaagaaccggtctgggaagaaatcgttcgtgaaaatggcttaactccaacgaaactcaaagatgtgggcatttggtggtttggtgacgtaattcttggtaacgaatgctttttagatagtatgaacaaaagtaaagaacatggcttcctcggctttcgtaatagcaaaaatgccttcatcagctggatagataaggcaaaagcctacaaaatcgtgcca

SEQ ID NO: 1793 - DNA, 789 bp, Musa acuminata
atgtcctggtggtgggccggtgcgattggcgccgcgcgtaaaaaactggacgatgatttctccgcggcagcgccccgtcatcagtcagttgcgctggtcatcggtgcgacgggcatcgtcggcagctcattaattggaattctgcctctcccggatactcctgggggcccatggaaagtgtatggtgtctcgcgccgctccccgaacccgaacctgagtcccctgagcgatgtgacccataccgggcgcaaacactatatcggcccatttgaatcgattggcaagatcagcgctcatgatccgccatttcacgaagacttgccgcgcctgaacgtgccgaatttttactacgatcaggaggatattctctttgatgaattatccaaacgcgacggcgcggtgacgtggagcattcatcgcccgggaaccatctttggatttagtccgaccagtctgatgaatattattggcaccctgtgcgtgtatgccgcgatttgtcgtaaagaaggcgcgccacttaaatggtttggttcccgtacggcctgggacggcttctctgatgcttcggacgcggatttgattgccgaacatcagatctgggctgcagtcgatccgtatgcgaagaacgaggcattcaattgttcgaatggcgatggtgaggaaggtcgttttaaactagaagacgctatgcgcgaaaaagacaaagaacatggtttcctgggatttcgcaatacgttgacctcattcaattcctggattgataaaatgaaggcgttccggattgttcct

SEQ ID NO: 1794 - DNA, 1038 bp, Musa acuminata
atgtcttggtggtgggccggtgcgatcggtgcggcacgcaaaaagcttgaggatgatagcagtagcaccgtccccaaatatgaaagtgtggccattgtgattggtgcgaccggcatcgttggcaccagtcttgttgatatcttaccgctggcggatacaccaggcgggccttggaaagtatacgccgctccggtagccgcagacacacttcgtgttcagcacattcaatgtgatgttctggatgctgcggacgcagttgcgaaactgagccctcttacggatgtgacccatcttttttacgtggcatgggcgaatcgcctgaccgaggctgagaaccgtgtggtgaacagcgccatgctgcgtaatgttttatcggcggtagtgcccagcgcgcctaatttatgccatgtgtgcctgcagacaggccgcaagcattatgtgggtccgttcgaggcggtcggcaaggcgctggcccacgaccctccgttccgcgaagacctgccacgtctgcctgttccaaacttttactatgaccaggaggatattctgttcgatgaactgagcaagaaagagggtgcggtgacctggtcgattcatcgccccaccacgatctttggattttcgccaacgtcactgatgaatctgatcggcaccctctgcgtgtatgcagccatctgccgcaaagaaggtgcgccgctgaaatggttcggcagtcgtacgacctgggacgggttcaacgatgcctctgacgcggacttaattgctgagcaacagatttgggcggctgttgatccgtatgccaaaaacgaagcctttaatatatcgaacggcgacttattcaagtggaaacacctgtgggcggcgttggctgatcagtttggtttggagagtgtcggttacgagggtgaagcttcacgcttcaagctagaggacgccatgcgtggcaaagaggccgaacatggctttctgggcttccgtaataccgtagcatcttttaactcctgcatcgataaaatgaaagcctttaaaattgtgccg

SEQ ID NO: 1795 - DNA, 1188 bp, Anthurium amnicola
atgtcatggtggtgggcgggcgcgataggcgcggcacgtaaaaagctagaggaagaagaagataccggcggcggtcctcgccgttaccagtccgttggcctggtagtgggcgttaccggcatcgtcgggaatagcctggcagaaattctgccgctatctgacactcccggaggcccgtggaaagtgtacggagtcgcccgccgcccgcgccctgcctggaacctcgcggaccatccggtcgagtatatccagtgtgacgtttctgatgcagatgatgcccgcgccaaactgagcccccttaccgatgtaacccatctgttttatgttacttggagctcgcgtccgacagaagcagagaactgtgaagttaatgcgcgcatgctacgtaatgtgctggccaccttgattccagtgtgcccaggcctgcgtcatgtttgcctgcaaaccggccgcaaacattacatcggccctttcgaacttgtgggtaaaataccaaccgcagacccgccttatcacgaggatctgccgcggctggagtgtccgaacttttaccatgatcttgaagacgtactgttcgaaacagcagctaaggctggaagcttaacgtggagcgttcaccggcctggcttcatttttggcttcagcccgtattccatcatgaacgtaatgggctcattgtgtgtttatgccgccatttgtaagcatgaaggcattcccttgcgttatccaggcaatcgtgtggtttgggagggttattcaaacgcaagtgacgctgaccttattgcggaacatcagatttgggcagcagtggacccgtacgccaagaatgaagcgtttaactgctcaaatggtgatgtgttcaagtggaaacatctgtggagagttctcgctgaacagtttggtctggattatgtgggttatgaaggggaagagggccgcttcggagtggcggaagcgatggctggtaaaggccctgtctgggatgcgatcgtgaaagaaaacgaattaagccagacccgcctggaagaagtggctcagtggtggttcgtcgatctgctcgtcaactgcgaagatacccatcttgatagtatgaacaagagcaaggaacatggctttttaggtttccgtaactcagtgaatagtttcatttattggattgataagatgaaagcctacaaaatcgtgcca

SEQ ID NO: 1796 - DNA, 1179 bp, Cinchona Ledgeriana
atgtcatggtggtgggccggtgctgtgggtgcggctcgtaaaaccctcggtcaggatggtgccccgcgctcaaaaaactttcagtcggttgcgctgattataggcgtaaccggaattgtcgggggctcgttagctgagattttgcccctgtcggatacaccggggggtccgtggaaagtctatggcgttgcgcgccgcccacgaccgagctggaatctcgatcatccggtagagtacatccagtgtgatgtattggatgcaggggatacccgtgcgaaattgagccccctgtcagatattacccatatcttctgggtcacttgggccaacaggccttccgaagcagaatgcattaaagttaatggcgctatgttccagaatgtgttgaattccgtcgtacctaacgccccaaatctaagccacatttgcttgcagaccggccataaacactatattggcccgtttgaagcattcggaaagatcaaaccccatgaaactccgtttattgaagatgttccgcgtctcaatgccccgaacttctactataccttagaggacatgctgtttgatgcctgtaataaatcgaaaggcctgctgacgtggtctgttcatcgtgcggcggtaattttcggcttttctccgtgtagcatgatgaacctggtagggagcctgtgcgtctacgccgccatctgtaaagacgaaaacgtgcctctcaaattccctggaacgaaagcagcctggaactgctacagtgttgcatcggacgctgacctgattgcggaacatcaaatttggagtgccgtggatccgtacgccaaaaatgaagccttcaattgctcaaatggcgatgtattcaaatggaaacatctgtggaaggtcctggctgaacagtttgaagtcgaatacgcagagtttgacgagaacgaaaagtttgtctcactggcggaaaggatgaagaataaaggcccggtgtgggacgaaattgtcaaaaagaatcaactaactcccaccaaattagaagaggttgcgactttctggtttgcggatgtcattttcagcggggaatgcctgctagattccatgaataaaagcaaggagcatggtttcttaggattccgtaacacgtccaaatccctgatatcggttatcgataagatgaaagcgtacaaaattgtcccg

SEQ ID NO: 1797 - DNA, 1287 bp, Triticum aestivum
atgagctggtggtgggcgggtgcagttggcgccgttaaaaaacgccaggatgaacgggcggcggccgcggaaccgacctttcaatcggtagccctgattctggggagtaccggtattgtaggaaccagtttactggatatcctgccacgcgacgatacgccgggtggcccctggaaagtgtacgcggtctctcgccgtgcgccgccgggatggtcgaccccgccgccctccccagccgtaactcatctgcaactggacctagcggatccggcagccgtgcgagatgctttgactccgctgacggatgttacccatgtgttttatgctgcgtggtccagccatgaaaccgaagaccgtaaccgcgaggttaatgcgggcatgctgcgcaatgtgctgtcggtggtggtgccgggctgtccggccttagcgcacgtgtgtcttcaaacgggccggaaacactatgttggcccgtttgatgtaatcggtaaaattcctgccccggacccgccttatacggaagatatgccgcgtttagaccatccgaacttctattacgacctggaagatgttttattcgatcatgtttcgggccgtgatggtgccgtaacgtggagcgtgcatcgtccgaccgttattttcggttttagcccgcggtcggccatgaacgttgtagggtcactgtgtgtatatgcagcgatttgccgtaaagaaggcgccacgctgcgctggccgggctgcaaagtagcctgggaaggcttcacagatgcaagcgacgctgatctggtagccgaacacgaaatctgggcggctgtggacccgtttgccaaaaacgaggcgtttaattgcagtaacggtgatgtctttaaatggaaacagctgtggccgctgttggcggaccgtttcggcgtggaatgggccggctacgaaggcgaggattctcgctttgccttagcagatgcaatggcgggtaaggaagcggtgtggaccgaaattattcaagagaacgaacttgtaacgaccgagctggaggaaattacttcctggtggtttgtggatgccatgttgtccatcgacattgaacatttagacaacatgaacaaatcgaaggaacatgggtttctggggtttaggaatacaattaacagttttaatgcatggattgataaaatgaaggcatcaaaatgttatgctagcgtgtttaaaacggaaatcgtgtcttttaagacccgacgcacgaaagcaaagtacagccaagaagtgaatgcgcagaaacagcagaccctattg

SEQ ID NO: 1798 - DNA, 1023 bp, Aegilops tauschii
atgagctggtggtgggcgggtgcggtcggcgcagttaagaaatcgcaggaggaacgcaccgagccgtctttccagtcggtggcccttgtcgtggggtcaacgggcatagtggggacgagcttggtcgatatactgccgcgccatgatacccctggcggtccttggaaagcgcacccaacggaagctcagaaccgggaagcgaacagtgccatgctgcgcaacgtgctctctgtagtggtgccgggttgtccggcccttgcgcacgtttgtctgcagaccggacgtaaacactacatcggtccctatgaggctattggaaaaattcccgtaccggatccgccttatacggaagatatgccgcgcctggattacccgaatttttattatgatcaagaagatgttctgttcgaagaagtttcacgccgggatggtgcggtgtcttggagcgtgcaccgcccatccgtcgtgtttggctttagcccgcgttcagccatgaacgtggtagcgtctctgtgcgtgtatgcggcgatttgccgtaaagaaggtgccatgcttcgctggccgggtagccgcgtggcctgggagggattcagcgatgcgagcgatgccgacctggtggcggagcaggagatctgggccgccgttgatccgttagcaaagaatgaagcatttaactgctccaacggtgatctttataaatggaagcagctttggcccatggtggctgatcggtttggcgtagaatgggcggggtacgaaggcgaagaaagccgtttcatgctggctgatgccatggccggaaaggaggcggtgtgggcggaaattttgcaggaaaatgaactggttacgactgagctgcaagaaatagcgaactggtggtttttagatgcggtgtttaacgtgaaatgtgagcacctggactccatgaataaaagcaaagaacacggtttcctgggattccgcaacaccgcgaaaagttttaacgcctggattgataaaatgaaggtgctcaagatcgttccg

SEQ ID NO: 1799 - DNA, 1173 bp, Vinca minor
atgtcctggtggtgggctggtgcggtttcggcagcgcgcaaaattagcgatgaaaattacgaagcgccgaaaaaattccaaagcgtcgcactcattatcggcgttacgggcattgtaggcaacagcttggccgaaattttaccgctgtcggatacgcctggcggtccctggaaagtttacggagtggcgcgccgtcctcgtccagcatggaactcggaccatccggttgaatacatacaatgtgatgtttatagctcagaagaaacacagagcaaactgagccctctgacagatgttacccatatcttctggactacctgggcgaatcgtccgaccgaggcccagtgcattgaagtgaatggcagcatgtttcagaacgtaattgatgcactcctcccgaatgcaccgaacctgtcacacatttgtattcaaaccggtcacaagcactacattggtccgttcgaatctttcggaaaaatcaaaccgcatgacacgccgttcattgaggacgtccctcgtctggatgtaccgaatttttaccacaccctggaagatattgcgttcgacgcgtgcaataaaaaggaaggcctgacgtggagtgtgcatcgcccggcggtgattttcgggttctccccgaattctatgatgaatttaatcggtactctttgcgtgtatgcgactatttgcaaacacgaaaatgtcccgttgacttacccgggtacaaaagcggcgtggaattgctatagtgttgccagtgatgcggatctgattgccgagcatcagatttgggcggcggtggacccgtacgcaaagaatgaagcgtttaactgtagcaacggagatatttttaagtggaaacacctttggaaagtgttgtctgagcagttcgaagtggagtttgtcgagtttgacgaaaaccaggagtacgtaagtttaagtgagcgcatgaaaggcaaaggtcaggtatgggacgaaattgtgaagaaaaatcaacttttgccgaccaagctcgaggaagtcgccactttttggttcgctgatgtcattttaggctttgaatgtctgctggatagtatgaacaaatctaaggaacacggttttttaggttttcgcaacacagagaaaagtctgatctctgttgttgacaaaatgaaggcccacaaaatcgtacct

SEQ ID NO: 1800 - DNA, 1173 bp, Cinchona pubescens
atgagctggtggtggaaacgcagtattgacgccggcaaaaatagtggaaaaaaattggaggtcaatgaaaacgaagcaattgtcgaggattataaatctgtggcgcttgtggtcggagtcaccggtattgtaggcagttcactggctcaggtgctcgcgcttccgggcacgccagggggcccgtggaaggtgtacggcgttgcacgtcggagccgtcctgtgtggttcagtaaaaaccacctggaatatatccagtgtgatgtgtcgaatacccaagaaaccatcagcaaactgtcgcccctgaccgatattactcatatcttctatgtctcatggataggcagcgaggattgtgatatcaatgccactatgtttaagaatatcctgaacacggtgattccaaacgccccgaaactgcaacacatttgcctgcagaccggcattaaacattattttggtattttcgaggaaggttcgaaggtggaaccgcacgactccccttttaccgaagacttgccgcgtctggatgtgccgaacttttaccacgatctggaggatatcctgtatgaagaaacgtcgaaaaacaatttgacttggagcgttcatcgtccggcactggtgtttggctttagtccttgcagcctgatgaacattgcatctaccttgtgcgtgtatgcgactatttgcaaatatgagaataaaccgctagtctatacaggcagcaaagcgagctggaactgctattctgatgccgtggatgccgatctcattgcggagcaccagatttgggccgcagtcgacccgaaggcaaaaaaccaggttcttaattgcaacaatggggacgtgtttaaatggaaacatgtgtggaaaacgttagcagaacagtttgggttggagatggtgggctatatcgaaggaaagcagcaggtctccctagcggagctaatgaaggacaaggatcttgtatgggacgaaatcgtgaaaaaacacaacctggctccaaccaaattgaaagacatcgcggccttttggttcgcggatatcgcgttttgttctgaaaacttcctgtcaagcatgaataaaaacaaagaattaggctttttgggttttcgtgactcaattaaatcctttaacagctgcatcgacaaaatgcgcgcttatcgcttcattcct

SEQ ID NO: 1801 - DNA, 1179 bp, Ophiorrhiza pumila
atgtcttggtggtggaagcgtagcattggcgaaggtcagaattccgcaaaaacctccgaagagattaacggtttaaatggcgaggatgaccaagactacaaaagcgtgggcttggtcgtgggcgtgacgggtattgtgggctcatcactggcgcaagttctcactttgagtgataccccgaatggcccgtggaaagtgtatggcgttgcccgtcgccgtcgcccggattggttctcgaaacagcatttacactacattcagtgtgacgtttccaatacacaagaaacgatatcgaaattaagccccctgacggacatcacccacattttctacgtgagctgggtgggcagcgaagattgcgacacgaacgcaacgatgtttaagaacattgttaacatcgtgatcccgaacgcgccgaatctcaaacacatttctctacagactggttcgaaacactattttggcattttcgaggaaggctcgaaagttaaacctaacgagagcccgtttaaggaagatatgccacgcttggatgtgaaaaacttttatcacgacctggaggatatcttatacgaagaaacttcgaaaaacggcttaacctggagcgtacatcgcccggcgctggtttacgggttcagcccctgtagcatgatgaatatcgtatcaacgctgtcagtctacgccacaatttgcaaacacgaaaaccgtcctctaacgtatcctggaagcaaagcgtcatggaactgctatgtggattgtgtggacgcggatctgatcgcggagcatcatatttgggcggcggtggatccgaaagccaaaaatcagattcttaattgcacgaacggtgacgtgttcaaatggaaacatatttggaaagcgctggcggaggaattcggcctggaaatggtcggatacatcgaaggtaaagagcaggtgagcatggcggagctgatgaaggataaggaccttgtgtgggatgaaattgtgaaaaaaaataacctggtgccgaccaaactgaacgacatcgcggcgttctggttcgcagacatcgcattttcatgcgtcgacctgctgtcaagtatgaccaaaagcaaagaactgggcttcctgggctttcgcgataccatgaaatctttctccagttgtatcgacaaaatgcgagcgtaccgtttcatcccg

SEQ ID NO: 1802 - DNA, 1170 bp, Swertia japonica
atgtcttggtggtggaaacgctccgtccaggcacagaacctcccggagaagaatcagcctaacggcgtagctgagactgcaggtcgctatgaaagcgttgcgctcgtggtcggtgtgacaggcattgtgggcagctcacttgcgcaggtgctgaaactcccagataccccaggtggcccgtggaaggtgtatggcgtcgcgagacgtccgtgcccggcttggctcgcgaaattccatgttgaatatatccaatgcgatgtctccaataccgaagaagccaaaacaaagcttagcccgctgaaagatgtgacccacattttttatgtgagctggattggttcagaagattgcgagaccaacgcagtcatgttcaaaaatatcctgtacaacattattcccgtggcacctaatctgaaacacatctcccttcagaccgggagcaagcactatttcggtattttcgaggaaggtagcgaggacgtccctcacgaatccccgtacaccgaagatttacctcgtctcaatatcccaaacttttatcatgatcttgaggatattctgtttgaggaaacggccaaacacggactgacctggtgcgtacagcggccggcgcttatcttcggcttctctccgtgctcattaatgaatattgtttcgaccctgtccatctatgcgaccatctgtaaacacgaaaacaaacccctggtttaccccggatcgaaagcgtcatggaactgctacgttgacggtgcagatgcagatctggccgcagaacatcacatttgggccgccgttgaccccaaagcccgtaaccaggtgttcaatgtgaaaaatggagatgtctttaaatggaaaaacgtttggaaaatgctggctgatgagtttgaaatcgaaatggttggctatatcgaagggaacgaacaggtgagcatggctgaattaatgaaagacaaggacggcgtttgggatgaaattgtgaaaaaacataagttggaagatacgaaattaaaagaaattgccgcattctggttcgcggatattgcgttctcttgtgttgatctggtgatgagtgttacaaaaagccgagaattcggctttttaggttttcgcgatagtatgaagtcattcaagagctgcatccacaaaatgcgtgattttaagtttattccg

SEQ ID NO: 1803 - DNA, 1173 bp, Lonicera japonica
atgtcttggtggtggtctggcgcgattggtgccgccaaaaaaaaatttgatgatgacgatgcgccgaaaggattccagagtgtcgcgctggtgatcggaattacgggtattgtaggaaacagtttagcggaaatcttgccgttaagtgataccccgggcggcccctggaaagtgtacggcgtggcacgtcgcccgcgtccgtcgtggaatgcggatcatccggtggaatatattcaatgcgacatttctgatactgaacagacattgaccaaactgtctccgctgactgacgttacccatattttttggaacacttgggcgaatgggggtgcggaggccgtgtgttgcgaaattaatggcaccatgctaaaaaacgttctggccgccgccatcccgaacgcaccgaacttacgccacatatgcctgcagactggccataaacactatatcggcccgttcgagtcattcgggaaaattactcctcacgacacaccgttcgtagaagatgtcccgcgtctgaatgttaccaacttctattacaccctggaagatattaccgcggaagcagcggcacgcaagaatggcgccttaacgtggtcagtccatcgtcccgcggtcatctttggttttagcccgtactcaatgatgaacctggtaggcaccatatgtgtctatgcggcgatttgcaaacacgagaaggcgcctttcaaattccctggcacgaaagcggcatgggactgctattcagttgcaagcgatgcggatctcattgcggagcatcagatttgggcagccgttgatccgaacgccaaaaacgaaggttttaactgctctaacggtgatctctttaaatggaaacacctgtggaaagtgctggcggaacagtttgaggtggagtacgttgaattcgatgaaaatgaagccgccgtttcactctcggaacgcatgaaagaaaaagggccggtgtgggaggatatggttaaagaaaatggtctgaccccgaccaaactggaagaggtggcatccttttggtttgcggatgttattttctctggcgaatgcatgttggactcaatgaacaaatcgaaagagcatggctttctggggtttcgcaataccaagaatagcctgattaatgttatcgataaaatgaaggcgtacaaaattgttccc

SEQ ID NO: 1804 - DNA, 1164 bp, Rauwolfia serpentina
atgtcctggtggtggacccgtagtattggcgccggcaaaaatctccgcgagcagaataaagagaatggcgtcagcgagtcctataaatccgtggcccttgttgtgggcgtaacgggcatcgtaggctcatcactggcggaagtgctgaaactgccggataccccgggcggtgcttggaaagtctatggagtagcacgccgtccgtgcccggcgtggttagctaaaaagcagattgaatatgtgcaatgcgatgtcagcaacaccgaggaaacgactgcgaagctgtcgccgctgaaagatctgacccatattttttacgtctcctggatcggcagcgaggattgtcaaattaacgcaacgatgctacggaatattctggacgcggtaattccgaatgcacaaaacctgcagcatgtgtgcctgcagacaggcatcaagcactacttcggcatcttcgaggaaggttcagaagtggaaccgcatgatagcccgtttaccgaagacctgccacgcctcaacgtacctaacttttatcatgatctcgaagatattctgtatgaagaaactgcgaagaataacctgacatggtctgttcaccgcccggccttagtcttcggtttctcaccctgctcaatgatgaatatagcaagtaccctaagcgtctatgcgacgatctgcaagcacgagaataaacccctggtgtacccgggtagtaagaaatcttggaactgcagtgcggatgccgtagacgcggacctggtggcggagcaggaaatctgggcggccgtcgaccctaaggcaaaaaatcaggtactcaactgcaataatggcgatgtgttcaagtggaaacacatttggaagaccctggcagaacagttcgggctggaaatggttggttatgtggagggcaaagaacaggtgtcgctggcagaactgatgaaggacaaagatagtgtgtgggatgaaatcgttaaaaaacataatctggtaccggcccgtttgaaagatatcgcagcgttctggtttgcggacattgcgtttagttcagagaacctactctcgagtgtgaacaagtcaaaagaacacggctttttaggcttccggaacagcatgaagtctttcgtgtcatgtatcgacaaaatgcgcgattataaattcattccg

SEQ ID NO: 1805 - DNA, 1218 bp, Lonicera japonica
atgtcttggtggtggacacgcagcattggtggggaaaaaggctcgtcatacggcaaaattgctgaacagaacggagtgcaggccaatgggaattctcatttacataaaaaggaggaaaatgggggtccggccacgtataaaagcgtggcgttgatagtaggcgtaaccggcattgtagggtcgagcttagcagagattttgccgttgcagaacactccgggcggtccgtggaaagtatacggcgtggcgaggcgtccgcgtccgtcttggacagataaaagccctattaattatattcaatgcgatgtctcgaacacaattgagaccgtggcgaagcttagcccgctgaccgatattacccatattttctacgtgagctggatgggttcagaagactgtgaaattaatgccattatgttccaaaacattctagatgccgttatcccgaacgccccgaacttaaaacacatctcgctgcaaacggggattaaacactatatgggggtgtttgaaactgatactaaacagaaaccgcacgactcaccgtatactgaggacctgccgcgtcttaacgttcagaacttttaccataacctggaagacattctttatgaagagacggccaaaaaaggtctgacctggtctgtgcatcgcccggcgttagtattcggctttagcccatgctcgatgatgaatatcgtctcaaccctttccgtgtatgcagcgatttgcaaacatgagaacaagccactcgtgtaccctggctcgaagggctcttgggattgttacgcggatgctgtagacgccgatctgatcgcggagcatcatatatgggctgcggtggatccgaaagcaaagaatgaaatctttaactgcaataacggcgacgtgtttaaatggaaacatatttggaaagctctggccgaaaagttcgagcttgaaatggtgggctacgaagaaggaaaagagcaggtgagcatggcagagatgatgaaagataaggaggaagtgtgggatgaaattgtacgtgaaaacaagcttgtaccgacaaaacttaaggacattgcggcctggtggtttgcggatatcgcctttgtcacgcaaaacgtactctcctctatgaacaagaacaaagaacatggatttgaaggcttccgcaattccaccaaatcgtttgtttcttgcattgataaaatgaaagcctatcgcattatcccc

SEQ ID NO: 1806 - DNA, 1242 bp, Oryza sativa
atggtctcatcggcactgcctcgcggggaaccggtgacacacatttgtgtggacctggcagatccggcggcagtttcggcggccttggcccccttgacagatatcacccatgtgttctatgttgcctgggcgcctcattttttcgaagaggatcagaaccgtgaagcgaactcccgtatgctgcgcaatgtcctgagcgcagttgtacccaattgcccggcactcgtacacgtgtcgcttcagacgggttcaaaacattatatcggcccgccggagagcatcggtaagttcacgatagaaactccattcagtgaggatatgccgcggctggataattgccctaacctgtattacgatcaggaagatgcgcttttcgatgccgtatctcgtagccgtcgccgcggcgccgcggtgattagctggtcagttcatcgccctttcccgcgtgttcgactcttgccggcggaacggcacgaaagaggtgtacatccgttacgagttaggggacatctgccacagggtggccgtcaagaagcgcctgttgcgggcgtcgcacgtcgcgtaggtcgtgtacagcagcgcgttcgccgcggtccgcgtcgtggcgcagcgcatctgggaggccggcgaccaggtggcgaggaacgtggtgtgcagctgcagcagagacgtcggttacaggtcgaagccgcagtcgacggtgcccgtcggcaagtccgcgacggagtggtgggagttcggggtggcggagaacagggtgaaccggatggcggcggcatcgtgcgggaggaagggttagtagcggccgcggaattagaccaggtggcaaactggtggtttgtcgatgcgctcttcatggataaatgggagtttctggacactatgaacaaaagcaaagaacacggctttctgggattccgtaataccgtgaaaagctttggcacctggatcgacaaactgcgcctgtataaaattgtaccgtcatgtcgtatcggtgaaccggacggcgggggtatcgtacgtgaagaaggcctggtagcagccgcagaactggatcaagttgcgaattggtggtttgtggatgcgttatttatggacaaatgggagtttcttgataccatgaataaatccaaggaacacgggtttctgggttttcgcaataccgttaaatccttcggcacctggattgataaattacgtctgtataaaattgtgccgagttgtcgtattgtgtcaagtctg

SEQ ID NO: 1807 - DNA, 795 bp, Phaedon cochleariae
atgtggttcaccaatatacttgtggttctgattgttggcgttgcgctggttaagtcgtcgcacgcgcagccatatacctttccggatgacttcgtattctgcgacttagaatcaccggacttatctacgtgccttcgcgacaaacttcaaaactggacgaccatgctgggtacgcgcggcatcaaccacccgattcggtttacattggaaccaatggtaattgatttctgggtgcttaatatgaatcttaacttcctgaacagcacggaatatctgtggaattgtacctttagccagttctggaatagcacggtcattagtgctagctacaatccggaaaattacacgttggtctacactagctattacccgcacataatcgaacacggccgctatcagatgttcggtacagtatcattcgaagatggcagtgtggatgcaatatacggcaacggcccgtacgataaacacatatacggcctgaatctaacccacaaaatcacattcgttccagtcctgcgggagcatggtgtcgaatacctgcaggtttcacgttatgagctggattcagatggatttcgcgataccagcttgcaatggcataatttatacaatggtgataccattcgcggcaatcgtaccgtcactcgattagcgcacaatgcgatggcgctcggtggcgcacttgcaaaaccgtttaccgatatgaccatagctatgttccgcctgtacactgaaaacctgatttcgagcgtgccccgccgccagctgaggcgtcatttctcacgccacccg

SEQ ID NO: 1808 - protein, 398 aa, Saccharomyces cerevisiae
MSQNVYIVSTARTPIGSFQGSLSSKTAVELGAVALKGALAKVPELDASKDFDEIIFGNVLSANLGQAPARQVALAAGLSNHIVASTVNKVCASAMKAIILGAQSIKCGNADVVVAGGCESMTNAPYYMPAARAGAKFGQTVLVDGVERDGLNDAYDGLAMGVHAEKCARDWDITREQQDNFAIESYQKSQKSQKEGKFDNEIVPVTIKGFRGKPDTQVTKDEEPARLHVEKLRSARTVFQKENGTVTAANASPINDGAAAVILVSEKVLKEKNLKPLAIIKGWGEAAHQPADFTWAPSLAVPKALKHAGIEDINSVDYFEFNEAFSVVGLVNTKILKLDPSKVNVYGGAVALGHPLGCSGARVVVTLLSILQQEGGKIGVAAICNGGGGASSIVIEKI

SEQ ID NO: 1809 - protein, 491 aa, Saccharomyces cerevisiae
MKLSTKLCWCGIKGRLRPQKQQQLHNTNLQMTELKKQKTAEQKTRPQNVGIKGIQIYIPTQCVNQSELEKFDGVSQGKYTIGLGQTNMSFVNDREDIYSMSLTVLSKLIKSYNIDTNKIGRLEVGTETLIDKSKSVKSVLMQLFGENTDVEGIDTLNACYGGTNALFNSLNWIESNAWDGRDAIVVCGDIAIYDKGAARPTGGAGTVAMWIGPDAPIVFDSVRASYMEHAYDFYKPDFTSEYPYVDGHFSLTCYVKALDQVYKSYSKKAISKGLVSDPAGSDALNVLKYFDYNVFHVPTCKLVTKSYGRLLYNDFRANPQLFPEVDAELATRDYDESLTDKNIEKTFVNVAKPFHKERVAQSLIVPTNTGNMYTASVYAAFASLLNYVGSDDLQGKRVGLFSYGSGLAASLYSCKIVGDVQHIIKELDITNKLAKRITETPKDYEAAIELRENAHLKKNFKPQGSIEHLQSGVYYLTNIDDKFRRSYDVKK

SEQ ID NO: 1810 - protein, 526 aa, Saccharomyces cerevisiae
MADQLVKTEVTKKSFTAPVQKASTPVLTNKTVISGSKVKSLSSAQSSSSGPSSSSEEDDSRDIESLDKKIRPLEELEALLSSGNTKQLKNKEVAALVIHGKLPLYALEKKLGDTTRAVAVRRKALSILAEAPVLASDRLPYKNYDYDRVFGACCENVIGYMPLPVGVIGPLVIDGTSYHIPMATTEGCLVASAMRGCKAINAGGGATTVLTKDGMTRGPVVRFPTLKRSGACKIWLDSEEGQNAIKKAFNSTSRFARLQHIQTCLAGDLLFMRFRTTTGDAMGMNMISKGVEYSLKQMVEEYGWEDMEVVSVSGNYCTDKKPAAINWIEGRGKSVVAEATIPGDVVRKVLKSDVSALVELNIAKNLVGSAMAGSVGGFNAHAANLVTAVFLALGQDPAQNVESSNCITLMKEVDGDLRISVSMPSIEVGTIGGGTVLEPQGAMLDLLGVRGPHATAPGTNARQLARIVACAVLAGELSLCAALAAGHLVQSHMTHNRKPAEPTKPNNLDATDINRLKDGSVTCIKS

SEQ ID NO: 1811 - protein, 443 aa, Saccharomyces cerevisiae
MSLPFLTSAPGKVIIFGEHSAVYNKPAVAASVSALRTYLLISESSAPDTIELDFPDISFNHKWSINDFNAITEDQVNSQKLAKAQQATDGLSQELVSLLDPLLAQLSESFHYHAAFCFLYMFVCLCPHAKNIKFSLKSTLPIGAGLGSSASISVSLALAMAYLGGLIGSNDLEKLSENDKHIVNQWAFIGEKCIHGTPSGIDNAVATYGNALLFEKDSHNGTINTNNFKFLDDFPAIPMILTYTRIPRSTKDLVARVRVLVTEKFPEVMKPILDAMGECALQGLEIMTKLSKCKGTDDEAVETNNELYEQLLELIRINHGLLVSIGVSHPGLELIKNLSDDLRIGSTKLTGAGGGGCSLTLLRRDITQEQIDSFKKKLQDDFSYETFETDLGGTGCCLLSAKNLNKDLKIKSLVFQLFENKTTTKQQIDDLLLPGNTNLPWTS

SEQ ID NO: 1812 - protein, 451 aa, Saccharomyces cerevisiae
MSELRAFSAPGKALLAGGYLVLDTKYEAFVVGLSARMHAVAHPYGSLQGSDKFEVRVKSKQFKDGEWLYHISPKSGFIPVSIGGSKNPFIEKVIANVFSYFKPNMDDYCNRNLFVIDIFSDDAYHSQEDSVTEHRGNRRLSFHSHRIEEVPKTGLGSSAGLVTVLTTALASFFVSDLENNVDKYREVIHNLAQVAHCQAQGKIGSGFDVAAAAYGSIRYRRFPPALISNLPDIGSATYGSKLAHLVDEEDWNITIKSNHLPSGLTLWMGDIKNGSETVKLVQKVKNWYDSHMPESLKIYTELDHANSRFMDGLSKLDRLHETHDDYSDQIFESLERNDCTCQKYPEITEVRDAVATIRRSFRKITKESGADIEPPVQTSLLDDCQTLKGVLTCLIPGAGGYDAIAVITKQDVDLRAQTANDKRFSKVQWLDVTQADWGVRKEKDPETYLDK

SEQ ID NO: 1813 - protein, 396 aa, Saccharomyces cerevisiae
MTVYTASVTAPVNIATLKYWGKRDTKLNLPTNSSISVTLSQDDLRTLTSAATAPEFERDTLWLNGEPHSIDNERTQNCLRDLRQLRKEMESKDASLPTLSQWKLHIVSENNFPTAAGLASSAAGFAALVSAIAKLYQLPQSTSEISRIARKGSGSACRSLFGGYVAWEMGKAEDGHDSMAVQIADSSDWPQMKACVLVVSDIKKDVSSTQGMQLTVATSELFKERIEHVVPKRFEVMRKAIVEKDFATFAKETMMDSNSFHATCLDSFPPIFYMNDTSKRIISWCHTINQFYGETIVAYTFDAGPNAVLYYLAENESKLFAFIYKLFGSVPGWDKKFTTEQLEAFNHQFESSNFTARELDLELQKDVARVILTQVGSGPQETNESLIDAKTGLPKE

SEQ ID NO: 1814 - protein, 622 aa, Ocimum basilicum
MQYKLALNGKTLKGETTTEAVDAATAEKVFKQYANDNGVDGEWTYDDATKTFTVTESCARITVTLPYRSAKTSIQRGITHYPALIRPRFSACTPLASAMPLSSTPLINGDNSQRKNTRQHMEESSSKRREYLLEETTRKLQRNDTESVEKLKLIDNIQQLGIGYYFEDAINAVLRSPFSTGEEDLFTAALRFRLLRHNGIEISPEIFLKFKDERGKFDESDTLGLLSLYEASNLGVAGEEILEEAMEFAEARLRRSLSEPAAPLHGEVAQALDVPRHLRMARLEARRFIEQYGKQSDHDGDLLELAILDYNQVQAQHQSELTEIIRWWKELGLVDKLSFGRDRPLECFLWTVGLLPEPKYSSVRIELAKAISILLVIDDIFDTYGEMDDLILFTDAIRRWDLEAMEGLPEYMKICYMALYNTTNEVCYKVLRDTGRIVLLNLKSTWIDMIEGFMEEAKWFNGGSAPKLEEYIENGVSTAGAYMAFAHIFFLIGEGVTHQNSQLFTQKPYPKVFSAAGRILRLWDDLGTAKEEQERGDLASCVQLFMKEKSLTEEEARSRILEEIKGLWRDLNGELVYNKNLPLSIIKVALNMARASQVVYKHDQDTYFSSVDNYVDALFFTQ

SEQ ID NO: 1815 - protein, 436 aa, Abies grandis
MQYKLALNGKTLKGETTTEAVDAATAEKVFKQYANDNGVDGEWTYDDATKTFTVTEAYSAMATMGYNGMAASCHTLHPTSPLKPFHGASTSLEAFNGEHMGLLRGYSKRKLSSYKNPASRSSNATVAQLLNPPQKGKKAVEFDFNKYMDSKAMTVNEALNKAIPLRYPQKIYESMRYSLLAGGKRVRPVLCIAACELVGGTEELAIPTACAIEMIHTMSLMHDDLPCIDNDDLRRGKPTNHKIFGEDTAVTAGNALHSYAFEHIAVSTSKTVGADRILRMVSELGRATGSEGVMGGQMVDIASEGDPSIDLQTLEWIHIHKTAMLLECSVVCGAIIGGASEIVIERARRYARCVGLLFQVVDDILDVTKSSDELGKTAGKDLISDKATYPKLMGLEKAKEFSDELLNRAKGELSCFDPVKAAPLLGLADYVAFRQN

SEQ ID NO: 1816 - protein, 352 aa, Saccharomyces cerevisiae; identical to SEQ ID NO: 2

SEQ ID NO: 1817 - protein, 288 aa, Saccharomyces cerevisiae
MTADNNSMPHGAVSSYAKLVQNQTPEDILEEFPEIIPLQQRPNTRSSETSNDESGETCFSGHDEEQIKLMNENCIVLDWDDNAIGAGTKKVCHLMENIEKGLLHRAFSVFIFNEQGELLLQQRATEKITFPDLWTNTCCSHPLCIDDELGLKGKLDDKIKGAITAAVRKLDHELGIPEDETKTRGKFHFLNRIHYMAPSNEPWGEHEIDYILFYKINAKENLTVNPNVNEVRDFKWVSPNDLKTMFADPSYKFTPWFKIICENYLFNWWEQLDDLSEVENDRQIHRML

SEQ ID NO: 1818 - protein, 714 aa, Catharanthus roseus; identical to SEQ ID NO: 286

SEQ ID NO: 1819 - protein, 501 aa, Vigna angularis; identical to SEQ ID NO: 272

SEQ ID NO: 1820 - protein, 451 aa, Nepeta musinii
MQYKLALNGKTLKGETTTEAVDAATAEKVFKQYANDNGVDGEWTYDDATKTFTVTESLSWWRAGAAKKRMDDDESLLVKQQQQQCVALIVGVTGLVGNSLAEMLPLPDTPGGPWKVYGVARRARPSWNEDQPMTYISCDVSNTGEVEAKLSPLSDVTHIFYATWTSRSTEEENCEANGKMLKNVLDAMIPNCPNLKHICLQTGRFHYVASVVDWKINGSHDTPLTEDLPRLKTNNFYYTQEDILLEEVKRKEGLTWSVHRPGTIFGFSPYSMMNLVGTLCVYAAICKQEGAVLRFPGCKGAWDGHSDCADADLIAEQQIWAALDPHAKNQAFNVSNGDLFKWKHLWKVLADQFGVECGDYEEGQQLRLQDVMKDKGPVWDKIVAENGLSNTKLEDVGKWWFSDTILWNECRLDSMNKSKEHGFLGFRNSKNCFLYWIHKVKAYNLVPSTYT

SEQ ID NO: 1821 - protein, 493 aa, Catharanthus roseus; identical to SEQ ID NO: 250

SEQ ID NO: 1822 - protein, 688 aa, Arabidopsis thaliana; identical to SEQ ID NO: 285

SEQ ID NO: 1823 - protein, 415 aa, Catharanthus roseus
MQYKLALNGKTLKGETTTEAVDAATAEKVFKQYANDNGVDGEWTYDDATKTFTVTEAKSPEVEHPVKAFGWAARDTSGHLSPFHFSRRATGEHDVQFKVLYCGICHSDLHMIKNEWGFTKYPIVPGHEIVGIVTEVGSKVEKFKVGDKVGVGCLVGSCRKCDMCTKDLENYCPGQILTYSATYTDGTTTYGGYSDLMVADEHFVIRWPENLPMDIGAPLLCAGITTYSPLRYFGLDKPGTHVGVVGLGGLGHVAVKFAKAFGAKVTVISTSESKKQEALEKLGADSFLVSRDPEQMKAAAASLDGIIDTVSAIHPIMPLLSILKSHGKLILVGAPEKPLELPSFPLIAGRKIIAGSAIGGLKETQEMIDFAAKHNVLPDVELVSMDYVNTAMERLLKADVKYRFVIDVANTLKSA

SEQ ID NO: 1824 - protein, 490 aa, Nepeta cataria; identical to SEQ ID NO: 534

SEQ ID NO: 1825 - protein, 493 aa, Catharanthus roseus; identical to SEQ ID NO: 250

SEQ ID NO: 1826 - DNA, 1197 bp, Saccharomyces cerevisiae
atgtctcagaacgtttacattgtatcgactgccagaaccccaattggttcattccagggttctctatcctccaagacagcagtggaattgggtgctgttgctttaaaaggcgccttggctaaggttccagaattggatgcatccaaggattttgacgaaattatttttggtaacgttctttctgccaatttgggccaagctccggccagacaagttgctttggctgccggtttgagtaatcatatcgttgcaagcacagttaacaaggtctgtgcatccgctatgaaggcaatcattttgggtgctcaatccatcaaatgtggtaatgctgatgttgtcgtagctggtggttgtgaatctatgactaacgcaccatactacatgccagcagcccgtgcgggtgccaaatttggccaaactgttcttgttgatggtgtcgaaagagatgggttgaacgatgcgtacgatggtctagccatgggtgtacacgcagaaaagtgtgcccgtgattgggatattactagagaacaacaagacaattttgccatcgaatcctaccaaaaatctcaaaaatctcaaaaggaaggtaaattcgacaatgaaattgtacctgttaccattaagggatttagaggtaagcctgatactcaagtcacgaaggacgaggaacctgctagattacacgttgaaaaattgagatctgcaaggactgttttccaaaaagaaaacggtactgttactgccgctaacgcttctccaatcaacgatggtgctgcagccgtcatcttggtttccgaaaaagttttgaaggaaaagaatttgaagcctttggctattatcaaaggttggggtgaggccgctcatcaaccagctgattttacatgggctccatctcttgcagttccaaaggctttgaaacatgctggcatcgaagacatcaattctgttgattactttgaattcaatgaagccttttcggttgtcggtttggtgaacactaagattttgaagctagacccatctaaggttaatgtatatggtggtgctgttgctctaggtcacccattgggttgttctggtgctagagtggttgttacactgctatccatcttacagcaagaaggaggtaagatcggtgttgccgccatttgtaatggtggtggtggtgcttcctctattgtcattgaaaagatatga

SEQ ID NO: 1827 - DNA, 1476 bp, Saccharomyces cerevisiae
atgaaactctcaactaaactttgttggtgtggtattaaaggaagacttaggccgcaaaagcaacaacaattacacaatacaaacttgcaaatgactgaactaaaaaaacaaaagaccgctgaacaaaaaaccagacctcaaaatgtcggtattaaaggtatccaaatttacatcccaactcaatgtgtcaaccaatctgagctagagaaatttgatggcgtttctcaaggtaaatacacaattggtctgggccaaaccaacatgtcttttgtcaatgacagagaagatatctactcgatgtccctaactgttttgtctaagttgatcaagagttacaacatcgacaccaacaaaattggtagattagaagtcggtactgaaactctgattgacaagtccaagtctgtcaagtctgtcttgatgcaattgtttggtgaaaacactgacgtcgaaggtattgacacgcttaatgcctgttacggtggtaccaacgcgttgttcaactctttgaactggattgaatctaacgcatgggatggtagagacgccattgtagtttgcggtgatattgccatctacgataagggtgccgcaagaccaaccggtggtgccggtactgttgctatgtggatcggtcctgatgctccaattgtatttgactctgtaagagcttcttacatggaacacgcctacgatttttacaagccagatttcaccagcgaatatccttacgtcgatggtcatttttcattaacttgttacgtcaaggctcttgatcaagtttacaagagttattccaagaaggctatttctaaagggttggttagcgatcccgctggttcggatgctttgaacgttttgaaatatttcgactacaacgttttccatgttccaacctgtaaattggtcacaaaatcatacggtagattactatataacgatttcagagccaatcctcaattgttcccagaagttgacgccgaattagctactcgcgattatgacgaatctttaaccgataagaacattgaaaaaacttttgttaatgttgctaagccattccacaaagagagagttgcccaatctttgattgttccaacaaacacaggtaacatgtacaccgcatctgtttatgccgcctttgcatctctattaaactatgttggatctgacgacttacaaggcaagcgtgttggtttattttcttacggttccggtttagctgcatctctatattcttgcaaaattgttggtgacgtccaacatattatcaaggaattagatattactaacaaattagccaagagaatcaccgaaactccaaaggattacgaagctgccatcgaattgagagaaaatgcccatttgaagaagaacttcaaacctcaaggttccattgagcatttgcaaagtggtgtttactacttgaccaacatcgatgacaaatttagaagatcttacgatgttaaaaaataa

SEQ ID NO: 1828 - DNA, 1581 bp, Saccharomyces cerevisiae
atggcagaccaattggtgaaaactgaagtcaccaagaagtcttttactgctcctgtacaaaaggcttctacaccagttttaaccaataaaacagtcatttctggatcgaaagtcaaaagtttatcatctgcgcaatcgagctcatcaggaccttcatcatctagtgaggaagatgattcccgcgatattgaaagcttggataagaaaatacgtcctttagaagaattagaagcattattaagtagtggaaatacaaaacaattgaagaacaaagaggtcgctgccttggttattcacggtaagttacctttgtacgctttggagaaaaaattaggtgatactacgagagcggttgcggtacgtaggaaggctctttcaattttggcagaagctcctgtattagcatctgatcgtttaccatataaaaattatgactacgaccgcgtatttggcgcttgttgtgaaaatgttataggttacatgcctttgcccgttggtgttataggccccttggttatcgatggtacatcttatcatataccaatggcaactacagagggttgtttggtagcttctgccatgcgtggctgtaaggcaatcaatgctggcggtggtgcaacaactgttttaactaaggatggtatgacaagaggcccagtagtccgtttcccaactttgaaaagatctggtgcctgtaagatatggttagactcagaagagggacaaaacgcaattaaaaaagcttttaactctacatcaagatttgcacgtctgcaacatattcaaacttgtctagcaggagatttactcttcatgagatttagaacaactactggtgacgcaatgggtatgaatatgatttctaaaggtgtcgaatactcattaaagcaaatggtagaagagtatggctgggaagatatggaggttgtctccgtttctggtaactactgtaccgacaaaaaaccagctgccatcaactggatcgaaggtcgtggtaagagtgtcgtcgcagaagctactattcctggtgatgttgtcagaaaagtgttaaaaagtgatgtttccgcattggttgagttgaacattgctaagaatttggttggatctgcaatggctgggtctgttggtggatttaacgcacatgcagctaatttagtgacagctgttttcttggcattaggacaagatcctgcacaaaatgttgaaagttccaactgtataacattgatgaaagaagtggacggtgatttgagaatttccgtatccatgccatccatcgaagtaggtaccatcggtggtggtactgttctagaaccacaaggtgccatgttggacttattaggtgtaagaggcccgcatgctaccgctcctggtaccaacgcacgtcaattagcaagaatagttgcctgtgccgtcttggcaggtgaattatccttatgtgctgccctagcagccggccatttggttcaaagtcatatgacccacaacaggaaacctgctgaaccaacaaaacctaacaatttggacgccactgatataaatcgtttgaaagatgggtccgtcacctgcattaaatcctaa

SEQ ID NO: 1829 - DNA, 1332 bp, Saccharomyces cerevisiae
atgtcattaccgttcttaacttctgcaccgggaaaggttattatttttggtgaacactctgctgtgtacaacaagcctgccgtcgctgctagtgtgtctgcgttgagaacctacctgctaataagcgagtcatctgcaccagatactattgaattggacttcccggacattagctttaatcataagtggtctatcaatgatttcaatgccatcaccgaggatcaagtaaactcccaaaaattggccaaggctcaacaagccaccgatggcttgtctcaggaactcgttagtcttttggatccgttgttagctcaactatccgaatccttccactaccatgcagcgttttgtttcctgtatatgtttgtttgcctatgcccccatgccaagaatattaagttttctttaaagtctactttacccatcggtgctgggttgggctcaagcgcctctatttctgtatcactggccttagctatggcctacttgggggggttaataggatctaatgacttggaaaagctgtcagaaaacgataagcatatagtgaatcaatgggccttcataggtgaaaagtgtattcacggtaccccttcaggaatagataacgctgtggccacttatggtaatgccctgctatttgaaaaagactcacataatggaacaataaacacaaacaattttaagttcttagatgatttcccagccattccaatgatcctaacctatactagaattccaaggtctacaaaagatcttgttgctcgcgttcgtgtgttggtcaccgagaaatttcctgaagttatgaagccaattctagatgccatgggtgaatgtgccctacaaggcttagagatcatgactaagttaagtaaatgtaaaggcaccgatgacgaggctgtagaaactaataatgaactgtatgaacaactattggaattgataagaataaatcatggactgcttgtctcaatcggtgtttctcatcctggattagaacttattaaaaatctgagcgatgatttgagaattggctccacaaaacttaccggtgctggtggcggcggttgctctttgactttgttacgaagagacattactcaagagcaaattgacagcttcaaaaagaaattgcaagatgattttagttacgagacatttgaaacagacttgggtgggactggctgctgtttgttaagcgcaaaaaatttgaataaagatcttaaaatcaaatccctagtattccaattatttgaaaataaaactaccacaaagcaacaaattgacgatctattattgccaggaaacacgaatttaccatggacttcataa

SEQ ID NO: 1830 - DNA, 1356 bp, Saccharomyces cerevisiae
atgtcagagttgagagccttcagtgccccagggaaagcgttactagctggtggatatttagttttagatacaaaatatgaagcatttgtagtcggattatcggcaagaatgcatgctgtagcccatccttacggttcattgcaagggtctgataagtttgaagtgcgtgtgaaaagtaaacaatttaaagatggggagtggctgtaccatataagtcctaaaagtggcttcattcctgtttcgataggcggatctaagaaccctttcattgaaaaagttatcgctaacgtatttagctactttaaacctaacatggacgactactgcaatagaaacttgttcgttattgatattttctctgatgatgcctaccattctcaggaggatagcgttaccgaacatcgtggcaacagaagattgagttttcattcgcacagaattgaagaagttcccaaaacagggctgggctcctcggcaggtttagtcacagttttaactacagctttggcctccttttttgtatcggacctggaaaataatgtagacaaatatagagaagttattcataatttagcacaagttgctcattgtcaagctcagggtaaaattggaagcgggtttgatgtagcggcggcagcatatggatctatcagatatagaagattcccacccgcattaatctctaatttgccagatattggaagtgctacttacggcagtaaactggcgcatttggttgatgaagaagactggaatattacgattaaaagtaaccatttaccttcgggattaactttatggatgggcgatattaagaatggttcagaaacagtaaaactggtccagaaggtaaaaaattggtatgattcgcatatgccagaaagcttgaaaatatatacagaactcgatcatgcaaattctagatttatggatggactatctaaactagatcgcttacacgagactcatgacgattacagcgatcagatatttgagtctcttgagaggaatgactgtacctgtcaaaagtatcctgaaatcacagaagttagagatgcagttgccacaattagacgttcctttagaaaaataactaaagaatctggtgccgatatcgaacctcccgtacaaactagcttattggatgattgccagaccttaaaaggagttcttacttgcttaatacctggtgctggtggttatgacgccattgcagtgattactaagcaagatgttgatcttagggctcaaaccgctaatgacaaaagattttctaaggttcaatggctggatgtaactcaggctgactggggtgttaggaaagaaaaagatccggaaacttatcttgataaataa

SEQ ID NO: 1831 - DNA, 1191 bp, Saccharomyces cerevisiae
atgaccgtttacacagcatccgttaccgcacccgtcaacatcgcaacccttaagtattgggggaaaagggacacgaagttgaatctgcccaccaattcgtccatatcagtgactttatcgcaagatgacctcagaacgttgacctctgcggctactgcacctgagtttgaacgcgacactttgtggttaaatggagaaccacacagcatcgacaatgaaagaactcaaaattgtctgcgcgacctacgccaattaagaaaggaaatggaatcgaaggacgcctcattgcccacattatctcaatggaaactccacattgtctccgaaaataactttcctacagcagctggtttagcttcctccgctgctggctttgctgcactcgtctccgctattgctaagttataccaattaccacagtcaacttcagaaatatctagaatagcaagaaaggggtctggttcagcttgtagatcgttgtttggcggatacgtggcctgggaaatgggaaaagctgaagatggtcatgattccatggcagtacaaatcgcagacagctctgactggcctcagatgaaagcttgtgtcctagttgtcagcgatattaaaaaggatgtgagttccactcagggtatgcaattgaccgtggcaacctccgaactatttaaagaaagaattgaacatgtcgtaccaaagagatttgaagtcatgcgtaaagccattgttgaaaaagatttcgccacctttgcaaaggaaacaatgatggattccaactctttccatgccacatgtttggactctttccctccaatattctacatgaatgacacttccaagcgtatcatcagttggtgccacaccattaatcagttttacggagaaacaatcgttgcatacacgtttgatgcaggtccaaatgctgtgttgtactacttagctgaaaatgagtcgaaactctttgcatttatctataaattgtttggctctgttcctggatgggacaagaaatttactactgagcagcttgaggctttcaaccatcaatttgaatcatctaactttactgcacgtgaattggatcttgagttgcaaaaggatgttgccagagtgattttaactcaagtcggttcaggcccacaagaaacaaacgaatctttgattgacgcaaagactggtctaccaaaggaataa

SEQ ID NO: 1832 - DNA, 1869 bp, Ocimum basilicum
atgcagtacaaactggcgttaaatggtaaaactctaaaaggagagacaactacagaagcagtcgacgccgctacggctgaaaaggtctttaaacagtacgcaaatgataacggagtcgacggggaatggacgtacgacgatgcgacaaaaacgtttactgttaccgagtcttgcgcacgtatcaccgtgaccctgccttaccgtagcgccaaaacgagcatacaaagaggtatcacacattacccagcattaataagaccccgtttctccgcttgcacgcccttggcatctgccatgcctctgtcctctacccccttgataaacggcgataactcacaaagaaaaaacactcgtcaacacatggaggagtcctcatccaagagaagggaatacctactggaagaaacaacgcgtaagctacaaagaaatgataccgagtccgtagaaaaattaaaactaattgacaatatccagcaattgggtattggttattattttgaagatgcgatcaacgcagttctaaggagtccttttagtacaggtgaagaggatctgttcacggccgccctgaggtttagattactaagacataacggtatagaaattagtccggagatctttctgaagttcaaggatgagcgtggtaagttcgacgagagcgatacccttggtttgctatctctttatgaagcctccaatttaggtgtggccggggaggaaattttggaggaggcgatggaatttgctgaggccagattaagaagaagtctaagtgagccagcggcaccgctacatggagaagtagcgcaagcactagatgtcccgagacacctgagaatggctcgtcttgaggccaggagatttattgaacaatacggaaaacaaagtgatcacgacggagatctgctagagttagctatccttgattacaatcaggtacaggcgcaacaccaaagtgagttgacggaaataatcaggtggtggaaagaattgggtttagtagacaaattaagttttggcagggaccgtcctttagagtgttttctatggacggtgggcctgttacctgaaccgaagtacagtagcgtaagaatcgagttagcgaaagccatctctattttgttagtaatcgatgatatttttgacacatatggtgaaatggatgatttgatcctattcacagacgccattcgtaggtgggacctagaggcgatggaggggcttcccgagtacatgaaaatctgctacatggcattgtacaatacgacaaatgaggtctgttacaaagtactaagagacacgggaaggatcgtccttctaaatctgaagagtacatggattgacatgattgaaggcttcatggaagaggctaagtggttcaatggtggcagcgcacccaagctagaggaatacattgagaatggtgtaagcacggcgggtgcatatatggctttcgcgcatatcttctttcttattggtgagggtgttacacaccaaaacagtcagttattcacacagaagccataccccaaggttttctctgccgcgggtaggatattaagattgtgggatgatctagggacggcaaaggaagaacaggagaggggggatttggccagttgcgttcagttatttatgaaggaaaaatcattgacggaagaggaggcacgttctaggatcttggaggagatcaaagggctttggagggaccttaatggggagttagtgtataataagaacctgccccttagcatcataaaggtagcattgaacatggcgcgtgcctctcaagttgtttacaagcacgaccaagacacgtatttcagtagtgttgacaattacgtggatgctttgttcttcacgcaataa

SEQ ID NO: 1833 - DNA, 1311 bp, Abies grandis
atgcagtataaactagcattaaatgggaaaactctaaagggcgaaaccactacggaagcagtagatgctgccacggcggaaaaagttttcaagcaatacgccaacgataatggcgtggacggggaatggacctatgatgatgcgacaaagacttttactgtcacggaggcctattctgccatggctacgatggggtataacggtatggcggcgtcttgtcacactcttcacccaaccagcccgttgaagccctttcacggagccagtacgtccctggaggctttcaacggggagcatatgggcctgctgagaggttatagcaaaagaaagttgtcctcatataagaaccctgcttctagaagctctaatgctacagttgcacaattacttaacccgccgcaaaaagggaaaaaagccgttgagtttgactttaacaaatacatggatagtaaagccatgactgttaacgaggcgctgaataaagccatccctcttagatacccgcagaagatctacgagagcatgcgttacagcttgctagccggcgggaagagggttagaccggtcctttgtattgccgcctgtgaattggttggcgggacagaggagcttgcgattccaacggcgtgtgcgatagagatgatacatacgatgagccttatgcacgacgatctaccgtgtatcgacaatgacgacctaagaagagggaaaccaacgaatcacaaaatctttggggaggatactgctgtaacagcgggaaacgccctacattcctatgcgttcgaacacatcgcagtctctacctcaaagacagtaggtgccgacagaatcctaaggatggtatctgagttaggcagagctaccggctccgagggcgttatgggcggccaaatggtggatatagccagcgagggtgaccccagtattgacctacagacgctagaatggatacacattcataaaaccgcgatgcttcttgagtgtagcgttgtgtgcggcgctattatcggaggagcttctgaaatagtcattgagagagccaggaggtacgcaaggtgtgtaggtctgcttttccaggtcgtggatgacattcttgacgtgacgaaatcatcagatgaactggggaagactgccgggaaagatttgatatctgacaaagcgacttacccaaaactaatgggcttggagaaggcaaaggaatttagtgatgaactattgaatagagccaagggggaactgtcatgtttcgaccccgtcaaagcggccccattattggggcttgccgactacgtggcgtttcgtcaaaattaa

SEQ ID NO: 1834 - DNA, 1059 bp, Saccharomyces cerevisiae
atggcttcagaaaaagaaattaggagagagagattcttgaacgttttccctaaattagtagaggaattgaacgcatcgcttttggcttacggtatgcctaaggaagcatgtgactggtatgcccactcattgaactacaacactccaggcggtaagctaaatagaggtttgtccgttgtggacacgtatgctattctctccaacaagaccgttgaacaattggggcaagaagaatacgaaaaggttgccattctaggttggtgcattgagttgttgcaggcttactggttggtcgccgatgatatgatggacaagtccattaccagaagaggccaaccatgttggtacaaggttcctgaagttggggaaattgccatctgggacgcattcatgttagaggctgctatctacaagcttttgaaatctcacttcagaaacgaaaaatactacatagatatcaccgaattgttccatgaggtcaccttccaaaccgaattgggccaattgatggacttaatcactgcacctgaagacaaagtcgacttgagtaagttctccctaaagaagcactccttcatagttactttcgagactgcttactattctttctacttgcctgtcgcattggccatgtacgttgccggtatcacggatgaaaaggatttgaaacaagccagagatgtcttgattccattgggtgaatacttccaaattcaagatgactacttagactgcttcggtaccccagaacagatcggtaagatcggtacagatatccaagataacaaatgttcttgggtaatcaacaaggcattggaacttgcttccgcagaacaaagaaagactttagacgaaaattacggtaagaaggactcagtcgcagaagccaaatgcaaaaagattttcaatgacttgaaaattgaacagctataccacgaatatgaagagtctattgccaaggatttgaaggccaaaatttctcaggtcgatgagtctcgtggcttcaaagctgatgtcttaactgcgttcttgaacaaagtttacaagagaagcaaatag

SEQ ID NO: 1835 - DNA, 867 bp, Saccharomyces cerevisiae
atgactgccgacaacaatagtatgccccatggtgcagtatctagttacgccaaattagtgcaaaaccaaacacctgaagacattttggaagagtttcctgaaattattccattacaacaaagacctaatacccgatctagtgagacgtcaaatgacgaaagcggagaaacatgtttttctggtcatgatgaggagcaaattaagttaatgaatgaaaattgtattgttttggattgggacgataatgctattggtgccggtaccaagaaagtttgtcatttaatggaaaatattgaaaagggtttactacatcgtgcattctccgtctttattttcaatgaacaaggtgaattacttttacaacaaagagccactgaaaaaataactttccctgatctttggactaacacatgctgctctcatccactatgtattgatgacgaattaggtttgaagggtaagctagacgataagattaagggcgctattactgcggcggtgagaaaactagatcatgaattaggtattccagaagatgaaactaagacaaggggtaagtttcactttttaaacagaatccattacatggcaccaagcaatgaaccatggggtgaacatgaaattgattacatcctattttataagatcaacgctaaagaaaacttgactgtcaacccaaacgtcaatgaagttagagacttcaaatgggtttcaccaaatgatttgaaaactatgtttgctgacccaagttacaagtttacgccttggtttaagattatttgcgagaattacttattcaactggtgggagcaattagatgacctttctgaagtggaaaatgacaggcaaattcatagaatgctataa

SEQ ID NO: 1836 - DNA, 2142 bp, Catharanthus roseus
atggatagttcaagcgaaaaactgtctccattcgagttaatgagcgcgatattgaaaggggcgaagcttgacggtagtaactcttctgattcaggggtcgcagtatctcctgccgtaatggccatgttgttggagaacaaagagctagtcatgatacttacgacgtctgtcgcggttttgataggatgcgtggtggtactaatttggcgtaggagttccggttcaggaaagaaggttgtcgagccccccaagctaatcgttcctaaatccgtagtcgaacccgaggaaatcgatgaagggaaaaaaaaattcacgatctttttcggcacccaaacggggacggcagaggggttcgcaaaagccttggccgaagaagctaaagcgaggtatgaaaaggcagttattaaggtaatcgacatagacgattacgcggctgacgacgaggaatacgaagagaagtttagaaaagaaacccttgcgttctttattctagctacctacggcgacggggaaccaactgataatgcagctcgtttttataaatggttcgtggagggaaacgatcgtggggattggttgaaaaacctacaatatggcgtctttggtctgggtaataggcagtacgagcactttaacaaaatagcaaaggtcgtcgacgagaaggtcgccgagcagggaggtaagagaatcgttccgctggtgctgggagacgacgaccaatgtattgaagacgactttgcggcatggcgtgaaaacgtatggcctgagttagataatctgttaagagacgaggacgatacgacagtatctactacctacacagcagcgatccccgagtacagggtagtctttccggataaatctgattctctgatatcagaggctaatggacacgctaacggatatgcgaatgggaatacggtctatgacgcgcagcatccgtgtcgtagtaatgttgccgttcgtaaggagttacatacacctgcatctgataggagttgtactcatcttgactttgatattgcgggcacgggtttatcatacggtactggcgatcacgtaggcgtatactgtgataacttgagtgagactgttgaggaagctgagaggttgctgaatctacctccagaaacttacttctctctgcatgctgacaaagaggatggcacacctctagccggctcatccctgcctcccccttttccaccgtgcactctaagaactgctctaaccaggtacgcagatttgctaaacaccccgaagaagagtgcactgcttgcactagctgcctatgcctcagatccgaatgaagcagatagattaaagtacttggccagcccggcaggtaaagatgaatacgcgcagtctttagtcgcgaatcaaaggagcctattagaggttatggcagaatttccaagtgcaaaaccaccacttggggtgttctttgctgctatcgcgccgaggttacagccgcgtttttactctatcagctccagtccccgtatggcgccgtctcgtatacatgtaacctgtgccctagtttatgagaaaacgccgggaggtcgtattcacaagggagtgtgttcaacctggatgaagaatgctatccctttagaggagtccagggactgcagttgggcacctatttttgtcagacagtcaaactttaagttgcctgcggatcctaaagtgcctgtcataatgattggccccggtacggggctggccccgtttagaggattcctacaggaaagattggctctaaaggaggagggtgctgaacttggtacagcggtctttttttttggttgtaggaatagaaagatggactatatatatgaggacgagctaaaccactttctagaaatcggtgcgctatctgagttacttgtcgctttcagtcgtgagggtcccaccaagcagtatgttcagcacaaaatggctgaaaaagcctccgatatttggaggatgatttccgatggtgcctatgtatacgtttgcggagacgctaaagggatggccagggatgttcacaggaccctacacacaattgctcaggagcaggggtccatggattctacccaggcagagggatttgtaaagaacttacaaatgaccggaaggtaccttagggacgtatgg

SEQ ID NO: 1837 - DNA, 1506 bp, Vigna angularis
atggaaacaaatagcaccctgttttttacgttcacggtgcttttgattacgattataaccttcttaaaggctctgaaatccctgttcacccctaataagtcaaaaagtaatcttcctcccggacctaagggcctaccactagttggaaacctattgcaactaggcgccaaaccacatcagactctggccacgcttgcaaatatacatggaagcattatgagcttaaaacttggacaggagacgactatagtaatgtcatcagctgaggccgcaaaaggcgtacttcaaatccacgaccatttcctgagtaatagaaaaattcctgatgctatgagaggatcaagccacgatcacttctcattgccatttatgccggtaagtcaacaatggagggagttaaggaagctgtgtaacgagttgttattctctaataagaatctggatgcgacgcaggggttaaggtctaagaaggtgagagagctatactctgatatacaccgtagcagtctgaaaggggaacccgttaatattggcagactagccttcaaaacaactatcaaccagctaagcaataccatatatagtgaagacttccttcagagtgctgagaaggcaggtgaaatgaaggaactggtcacgaacatcatgaaagaggttgggaggccaaatcttgcggactgctttccggtattaaaaatgatagacccccatggcattagaaggcgtactggaagctacttctccaaactgttgaatatatttaaatcccttatccataagaggctggagctgcgtaaggatgcagcgggttactgcaccaaaaaagatatgctggacgctatgctgaatgatgcccaacacaagatggatattgtcaaaatacagaggttgtcacttgatttatttgtagctggtacagataccgtaacttccaccgtggaatgggccatggcggaactattacacaacccccacgtcatgtcaaaggccaaagaggaactggagaggattattgggaaagacaatttggtggaggaatccgatatcgcgaagctaccgtatcttcaggcgattgttaaggaaactttcagactgcaccctgcggtcccattactactgccaaggaaagccgaggtggaattcgagatgcacgggtacacgattccaaagggggctcaggttttaatcaatgtttgggcgattggcagggaccccaatctatgggagaagcctagattgttctggccagaaagatttttagaatcagagatagattttaaggggcgtagctttgaattgactcctttcggcggggggaggagaatttgtcccggcctgccattagcgattagactggtgttccttatgttgggcctattcataaacagcttcgattgggaactgcaagatatacagcctgaggatatgaacatggacgaaaactttgggctgaccttagagaaagcacagccggttttagcaatccctattatccctaagcactaa

SEQ ID NO: 1838 - DNA, 1356 bp, Nepeta musinii
atgcaatacaagcttgcccttaacggtaagaccttgaaaggcgagacaactacggaggccgtagatgccgcaactgcggaaaaagtattcaagcagtacgcaaatgataatggagttgatggtgagtggacatacgacgatgctactaaaacattcacagtgacggaatccctttcatggtggagagcaggagcggcgaagaaaaggatggatgatgacgagtccctgcttgtaaagcagcaacagcagcaatgtgtcgctctgattgttggagttacgggactggttggaaactctttagctgaaatgctgcctcttccagacaccccaggcggcccatggaaagtctatggggttgcacgtcgtgcgagaccatcttggaacgaggatcagccaatgacttacatctcatgcgatgtctcaaatactggtgaggtagaggccaagctatcccctttaagtgacgttacacacatattttatgccacttggacctccagaagcacagaggaggagaactgcgaggcaaacggcaagatgttgaaaaacgttctggatgcgatgatacccaattgtccaaacttaaagcatatttgcttgcaaacgggtagattccactatgtagcgtccgtcgtagattggaaaattaacgggtcacatgacactcctctgactgaggatttacccagactgaagactaacaatttttactatacccaggaggatattttgttagaggaagttaaaagaaaggaaggcttaacatggtccgtccatagacccggtactatatttggcttcagtccgtattcaatgatgaatcttgtcggtacactatgtgtctatgcggcaatttgcaaacaggaaggggccgtattaaggtttcctggttgtaagggcgcttgggatggtcactcagactgtgccgacgctgatcttatagccgaacaacagatatgggccgcgcttgacccccacgctaagaatcaagcattcaacgtgtcaaacggggacctattcaagtggaaacatctgtggaaggtactggcggatcaattcggggtggaatgcggagactatgaagaagggcaacagttaaggctgcaagacgtaatgaaagacaaagggcccgtatgggataagatagtggcagaaaacgggcttagcaacacgaaattggaagacgtagggaagtggtggttcagcgatacgattctatggaatgagtgtcgtttagattcaatgaacaaatccaaagagcacggcttcttaggttttaggaacagcaagaattgctttctatattggattcataaagtaaaggcatacaacttagtcccaagcacttatacataa

SEQ ID NO: 1839 - DNA, 1479 bp, Catharanthus roseus
atggattatttgactattatcttaaccttattgttcgcattgactctttatgaggcctttagctacctgagtaggagaaccaaaaacctgccgcctgggccaagtccgctaccttttattggcagtctgcaccttttgggggaccagccccataagagcctagcaaagctaagtaagaagcacggccccatcatgagtcttaaattaggtcaaatcaccacaatcgtcatatctagctcaacaatggctaaagaagttctacaaaagcaggatctggcctttagtagcagatctgttccaaatgcccttcacgcacacaatcagttcaaattttcagtagtctggctgcctgtcgcatccagatggaggtcacttaggaaggttctaaactctaatattttctctgggaataggctggacgcgaaccagcacctgagaactaggaaagtacaagagctgatagcgtactgcagaaaaaacagccagtctggcgaagccgttgacgtcggacgtgctgccttcaggactagcttgaatctattatccaatctgatatttagtaaggacttaactgacccttacagcgatagcgcgaaggaattcaaggatctggtgtggaatataatggtggaggcggggaagcccaatcttgttgatttctttccccttttggaaaaagtagacccccaaggtattaggcataggatgacaattcactttggtgaagtattgaaattgttcgggggtctagtcaacgagcgtttggaacagagacgtagtaagggcgagaaaaacgacgtcctagatgttctgcttactacttcacaggagtcccccgaagaaatcgatagaactcatatagagagaatgtgcttagatttgtttgtagccggtacagacaccacaagttctacccttgaatgggccatgtcagaaatgcttaagaacccagacaaaatgaaaaagacacaggatgagttagctcaggtaattggcagagggaaaaccattgaagaatcagacatcaaccgtcttccttaccttaggtgtgtaatgaaggaaacacttagaatccacccgcctgtcccgttcttaatacctcgtaaagtggagcagtcagttgaagtatgcggctataatgttcccaagggtagccaagtgctggtcaacgcctgggcaataggtagggacgaaacagtttgggacgatgcccttgcgttcaagccggagcgttttatggagagcgagctggacatcagaggcagggatttcgaacttattccgttcggggcggggagaagaatctgtccagggctaccattagctttgaggacggtccctcttatgctaggctctttgttaaatagtttcaactggaaactagaggggggtatggcgccaaaggacctggatatggaagagaagttcggaatcacgctgcaaaaggcacatccacttcgtgctgtaccttccacactt

SEQ ID NO: 1840 - DNA, 2064 bp, Arabidopsis thaliana
atgactagtgcgctatatgcatccgatctgttcaagcaattgaagtctatcatgggtacagactccctgtccgatgatgttgttcttgttattgcaactacaagcctagctttagttgccggttttgtcgtattactgtggaaaaaaacgacggctgataggagcggcgaattaaagccattaatgatccctaagtcactaatggcaaaagatgaggatgacgatttagatttaggttctggaaagacccgtgtcagtatcttctttggaacacagacagggacagcggagggtttcgctaaagcgttgtctgaggaaattaaggcaaggtatgagaaagccgcggtaaaggacgactatgcagcggacgatgaccaatatgaagaaaaacttaagaaggaaaccttagcctttttctgtgtagctacttacggggacggcgagccgaccgataacgctgcccgtttctataaatggtttactgaggagaatgagagggacattaaactacaacaactggcctacggagtgttcgctttagggaatagacagtacgaacactttaataaaattggcattgtattggacgaagaactgtgtaagaaaggcgcaaaaagacttatagaagtcggcctaggggatgatgaccagtctattgaggacgacttcaatgcatggaaagaaagtctgtggagcgagctggacaaactgcttaaagacgaagatgataagtcagtagccactccttatacggctgtaattcctgagtacagggttgtgacgcatgacccaaggttcaccacgcaaaagagcatggagtcaaatgtagccaacggcaacacgacgattgatattcaccatccgtgccgtgtagatgtagctgttcaaaaagagcttcacactcacgagtcagaccgttcatgtatccacttggagttcgatattagcaggaccggtataacctacgaaaccggagatcatgtgggtgtctatgccgaaaatcacgtggaaatcgtagaagaagccggtaagctacttggccattctttggaccttgtgtttagcatacacgcggataaagaagacggatcacccctagagagtgcggttccccccccgttcccagggccgtgtactctagggactggcttggcgaggtacgctgatttattaaatccccccagaaagtccgcgttggttgcgctggcagcgtatgctacggaaccgagcgaggctgagaaattgaaacacttaacctctcccgacggaaaggatgaatactcccagtggatagtggcatctcagcgtagtcttcttgaggtaatggctgcattcccaagtgctaaaccgccattgggtgtgttttttgccgcgatcgctccaaggttacagcccaggtactacagtatttcatctagtccgaggctggccccaagccgtgtacacgtgacgtctgcacttgtctacggccctacgccgacaggcaggatacacaagggtgtttgttccacatggatgaagaatgccgtccccgccgaaaagtcccatgaatgctccggtgcgcctatctttatcagggcttcaaattttaaattgccaagcaacccctcaaccccaattgtgatggtgggaccaggcacgggtctggctccgttccgtggctttcttcaagaaaggatggcgttaaaagaagatggcgaagaattggggtctagtctactattttttggctgtagaaatcgtcaaatggattttatatatgaggacgagttaaacaatttcgtcgatcaaggagttatatcagagctgatcatggctttctccagagagggtgcgcaaaaggaatacgttcaacataagatgatggagaaagccgcacaggtctgggatttgattaaagaggagggttatttatacgtgtgcggcgatgccaagggcatggccagggatgtccatagaaccttgcacactatcgtccaggagcaagaaggtgtatcttccagcgaggcagaggccattgtcaagaagttacagacagaggggagataccttagggatgtttgg

SEQ ID NO: 1841 - DNA, 1245 bp, Catharanthus roseus
atgcaatacaagttagccttgaacggtaagacgctgaagggggaaacaacgactgaagcagttgatgctgccacggctgagaaagtattcaaacagtatgctaatgacaatggggttgacggcgagtggacgtatgacgacgcgaccaagaccttcacagtcactgaggccaagtcacctgaagtagaacaccctgtcaaagcgttcggttgggcggcccgtgacacttctggccacttatccccgttccatttttcacgtcgtgcgaccggagagcacgatgtccaatttaaagtcctgtactgcggaatctgccactctgatctgcacatgattaaaaatgagtgggggtttactaaataccccatcgtgcccggacacgaaatagtaggcattgtcaccgaagtaggctctaaagtcgaaaagttcaaagtgggtgacaaggtcggtgtcggatgcttggtcggatcttgtagaaagtgtgacatgtgtactaaggacttagagaattactgcccgggccagatccttacatattccgccacgtacacagatggaactactacatatggaggttactccgatctaatggtcgcagatgaacattttgtcataaggtggccagaaaatcttcccatggacatcggagcgcctttgctgtgtgccgggataacgacatactcccctctacgttattttggcttggataaacccgggacccacgttggtgttgtcgggctgggtggcttgggccatgtcgcagttaagttcgcgaaagctttcggggccaaggtcacagtcatcagtacgagcgaatccaaaaagcaagaggcgttagagaagctgggggcagactccttcctggtatcaagggacccagagcaaatgaaagcagccgcggcatctttagacggtataatcgacaccgtgtctgcgatacatcctatcatgcctctgctgtccatattaaaatcacatggtaagttaatccttgttggtgcacccgaaaagccattggaacttccatcattcccacttattgccggaaggaagattatagcgggaagtgcgatcggaggtttgaaagagacacaagaaatgattgacttcgctgctaaacataatgtcttacccgatgtagaacttgtcagcatggactacgttaacacggccatggagagattactaaaagccgacgttaagtaccgttttgttatcgacgttgccaacacattaaagagtgcg

SEQ ID NO: 1842 - DNA, 1470 bp, Nepeta cataria; identical to SEQ ID NO: 1322

SEQ ID NO: 1843 - DNA, 1479 bp, Catharanthus roseus; identical to SEQ ID NO: 1041

SEQ ID NO: 1844 - DNA, 1527 bp, Artificial Sequence
  FMS1
atgaatacagtttcaccagccaaaaaaaaggttattataattggtgccggtattgctgggcttaaagctgcatctacgctacaccaaaacggtattcaagattgtcttgttcttgaggccagagatcgggtcggtggtaggttgcaaactgtcacaggctatcaaggtcggaaatatgatataggtgctagctggcaccatgatacgttgacaaaccctttatttttggaagaggctcaactgagtttgaatgatgggagaacgaggtttgtttttgatgacgataattttatttatatcgacgaagaacgtggaagggtagaccatgacaaggaactgcttcttgaaattgtggacaatgaaatgagcaaattcgcagagttagaattccatcaacacttaggagtttcagattgctccttttttcaattagtaatgaaatacttactacaaagacgccaatttctcacaaatgaccaaataagatatttgccacaactctgtcgatatctggaattgtggcacggcttagattggaagcttttgagtgccaaggatacatacttcggtcaccaaggaaggaacgcctttgctttgaactatgattctgtggttcaaagaattgctcaaagctttcctcaaaattggttaaagctaagttgtgaagtgaaatcaattacacgagaaccttcaaaaaatgtgacagtgaactgtgaagatggtactgtgtacaatgctgattatgttattattacagtacctcaaagtgtattgaatttgtctgtacaacctgaaaaaaatttacggggaagaatagaatttcaaccacccttgaaaccagtgattcaagatgcttttgacaagatccattttggagcgctaggtaaagtaatttttgagtttgaagaatgttgttggtcgaacgaaagttcaaaaattgtaactttggctaactctaccaatgaatttgtcgaaatagtacgtaatgcggaaaatttagatgaattagactctatgctagaaagggaagattctcaaaagcatacgagtgttacttgttggagccagcctttatttttcgtaaatttgtcaaaaagcacaggagtagcaagctttatgatgttgatgcaggcaccgcttacaaatcacatagaatccattagagaagataaagagcgtctttttagttttttccaacctgtgctgaacaagattatgaagtgtctagattctgaggatgtcatcgacggaatgaggccgatagaaaacattgcaaacgctaataaaccagtcttaagaaacatcatcgttagcaactggacacgcgatccttactcacgcggtgcttattcggcctgttttccaggagatgatccagttgatatggttgttgcaatgtctaatggtcaagactcccgcataagatttgcaggcgaacatactatcatggacggcgccggctgtgcctatggtgcttgggaaagcggaagacgggaggcgactcgaatctctgacttactgaaatag

SEQ ID NO: 1845 - DNA, 1050 bp, Artificial Sequence
  SUR2
atgaacgtaacatcgaatgcaactgcagccggttcctttccactagcatttggtctcaagacctcatttgggtttatgcactatgccaaggcccctgccattaatttacgccccaaggaatccttgctgccggaaatgagtgatggtgtgctggccttggttgcgccggttgttgcctactgggcgttgtctggtatattccatgtaatagacactttccatctggctgagaagtacagaattcatccgagcgaagaggttgccaagaggaacaaggcgtcgagaatgcatgttttccttgaagtgattctacaacatatcatacagaccattgttggccttatctttatgcacttcgagccgatctacatgactgggtttgaagaaaatgccatgtggaagcttcgtgcagaccttcctcggattattccagatgccgctatttattacggctatatgtacggaatgtccgctttgaagatctttgcaggctttttattcgttgatacatggcaatactttttgcatagattgatgcatatgaataagaccttatacaaatggttccactctgttcatcatgaactatacgtgccatatgcttacggtgctcttttcaacaatcctgttgagggcttcttgttagatactttgggaaccggtattgccatgacgttaactcatttgactcacagagagcaaatcattctttttacctttgccaccatgaagactgtcgatgaccactgtgggtatgctttgccacttgacccattccaatggcttttccctaataacgctgtctatcacgatatccaccaccagcaatttggtatcaagacgaactttgctcaaccatttttcactttctgggacaatttgttccaaactaactttaaagggtttgaagaatatcaaaagaagcaaagacgtgtcaccatcgacaagtacaaagagtttttgcaagagagagaattggaaaagaaggagaaactcaaaaacttcaaagctatgaatgctgctgaaaatgaagtaaagaaagagaaataa

SEQ ID NO: 1846 - DNA, 600 bp, Artificial Sequence; identical to SEQ ID NO: 1604
  pTDH3

SEQ ID NO: 1847 - DNA, 1074 bp, Artificial Sequence
  SWT21
atggaaaagaaggtaatatgtcaagatatcttttggtcatgtgatggtacatcgtttgtttctgtgcataatgattttggcatcagacaatatttagtgccggaggaaagtaatacggacaagctaaacagaaacctccttctaccatttacaaggttttttagaaaccagtctattgtttcatgtgcaatagacccgttttacacgctttataacgagaattccgacaggttagctggtgacagaatcgtggttggaggaaaaaacttccctctacaactatactctttgatggacgggcagtgtatcctcagctatgacacgatgaacaaaataaatggagaatacgaaactgtatacagtgtgaaaatcgatgttgagtctcgtgtatacactggctcatgccgtaacaaagtggcgatatacgacaagagcagacgagatgccgtgtggatgaaccagagtaccaaaaaagcaagcaagggaagacaaagcattatatcttgctttgaagagcaaccaatgggagggcaagctctctcaagaggatctctattgtgtggcagttatgcgaatgaaatgtttcaggtagactgccgtcatcaacgactagagagactgaactacacccgcacagttgcaggtgggattgtacaaatccttacaagcgataacgggcgttacgtgtacgttgtcagacgcaacagtgacgcgattagtatttacgatcggcgaaacctgcagcacgagcttaacgtattgcgcctaccgtttcggatccaccacaactctgcaaagttgaaggcatatatagatacggcttacggactaagtatggggacgccgcagggaacaatattgaactggggtcgagaccttgtggaatttggaggtgttccctcacacaatagtgttgaagacccactaatcacgtctatcccgccagagtcagagtggcgcactaaccttgattctactattcctgccacggtagtgaagaattgtcctggggatcccgaactgttcgccctatctcatgggggcacaatttcattatgcaggttcggcggctaa

SEQ ID NO: 1848 - DNA, 695 bp, Artificial Sequence; identical to SEQ ID NO: 1620
  pYEF3

SEQ ID NO: 1849 - DNA, 414 bp, Artificial Sequence
  QCR9
atggtatgttggtgtgtgtgtgtgctgcttcacatttcaggctaaaaatgttatccgtggaatcttccttagccaagtatcatgggctttggaaattagtttcccaccgatgagcgcaacgacttagcgaagcttatgaaattggtgacagcagctctatgaatatgttccatgcgtttccattcaggttactaacaatgcataaattatgagtagtctttttcatcactatataaaacctttttcaaacgaaacgctgtttttgttggtactatctttgcaggtgcctttgttttccaaactgtatttgatactgctattacttcatggtacgagaatcacaacaaaggaaaattatggaaagatgtcaaggctcgaatagctgcaggcgatggagacgacgatgatgagtaa

SEQ ID NO: 1850 - DNA, 725 bp, Artificial Sequence; identical to SEQ ID NO: 1581
  pGAL7

SEQ ID NO: 1851 - DNA, 2076 bp, Artificial Sequence
  NCP1
atgccgtttggaatagacaacaccgacttcactgtcctggcggggctagtgcttgccgtgctactgtacgtaaagagaaactccatcaaggaactgctgatgtccgatgacggagatatcacagctgtcagctcgggcaacagagacattgctcaggtggtgaccgaaaacaacaagaactacttggtgttgtatgcgtcgcagactgggactgccgaggattacgccaaaaagttttccaaggagctggtggccaagttcaacctaaacgtgatgtgcgcagatgttgagaactacgactttgagtcgctaaacgatgtgcccgtcatagtctcgatttttatctctacatatggtgaaggagacttccccgacggggcggtcaactttgaagactttatttgtaatgcggaagcgggtgcactatcgaacctgaggtataatatgtttggtctgggaaattctacttatgaattctttaatggtgccgccaagaaggccgagaagcatctctccgccgcgggcgctatcagactaggcaagctcggtgaagctgatgatggtgcaggaactacagacgaagattacatggcctggaaggactccatcctggaggttttgaaagacgaactgcatttggacgaacaggaagccaagttcacctctcaattccagtacactgtgttgaacgaaatcactgactccatgtcgcttggtgaaccctctgctcactatttgccctcgcatcagttgaaccgcaacgcagacggcatccaattgggtcccttcgatttgtctcaaccgtatattgcacccatcgtgaaatctcgcgaactgttctcttccaatgaccgtaattgcatccactctgaatttgacttgtccggctctaacatcaagtactccactggtgaccatcttgctgtttggccttccaacccattggaaaaggtcgaacagttcttatccatattcaacctggaccctgaaaccatttttgacttgaagcccctggatcccaccgtcaaagtgcccttcccaacgccaactactattggcgctgctattaaacactatttggaaattacaggacctgtctccagacaattgttttcatctttgattcagttcgcccccaacgctgacgtcaaggaaaaattgactctgctttcgaaagacaaggaccaattcgccgtcgagataacctccaaatatttcaacatcgcagatgctctgaaatatttgtctgatggcgccaaatgggacaccgtacccatgcaattcttggtcgaatcagttccccaaatgactcctcgttactactctatctcttcctcttctctgtctgaaaagcaaaccgtccatgtcacctccattgtggaaaactttcctaacccagaattgcctgatgctcctccagttgttggtgttacgactaacttgttaagaaacattcaattggctcaaaacaatgttaacattgccgaaactaacctacctgttcactacgatttaaatggcccacgtaaacttttcgccaattacaaattgcccgtccacgttcgtcgttctaacttcagattgccttccaacccttccaccccagttatcatgatcggtccaggtaccggtgttgccccattccgtgggtttatcagagagcgtgtcgcgttcctcgaatcacaaaagaagggcggtaacaacgtttcgctaggtaagcatatactgttttatggatcccgtaacactgatgatttcttgtaccaggacgaatggccagaatacgccaaaaaattggatggttcgttcgaaatggtcgtggcccattccaggttgccaaacaccaaaaaagtttatgttcaagataaattaaaggattacgaagaccaagtatttgaaatgattaacaacggtgcatttatctacgtctgtggtgatgcaaagggtatggccaagggtgtgtcaaccgcattggttggcatcttatcccgtggtaaatccattaccactgatgaagcaacagagctaatcaagatgctcaagacttcaggtagataccaagaagatgtctggtaa

SEQ ID NO: 1852 - DNA, 1176 bp, Artificial Sequence
  GPD1
atgtctgctgctgctgatagattaaacttaacttccggccacttgaatgctggtagaaagagaagttcctcttctgtttctttgaaggctgccgaaaagcctttcaaggttactgtgattggatctggtaactggggtactactattgccaaggtggttgccgaaaattgtaagggatacccagaagttttcgctccaatagtacaaatgtgggtgttcgaagaagagatcaatggtgaaaaattgactgaaatcataaatactagacatcaaaacgtgaaatacttgcctggcatcactctacccgacaatttggttgctaatccagacttgattgattcagtcaaggatgtcgacatcatcgttttcaacattccacatcaatttttgccccgtatctgtagccaattgaaaggtcatgttgattcacacgtcagagctatctcctgtctaaagggttttgaagttggtgctaaaggtgtccaattgctatcctcttacatcactgaggaactaggtattcaatgtggtgctctatctggtgctaacattgccaccgaagtcgctcaagaacactggtctgaaacaacagttgcttaccacattccaaaggatttcagaggcgagggcaaggacgtcgaccataaggttctaaaggccttgttccacagaccttacttccacgttagtgtcatcgaagatgttgctggtatctccatctgtggtgctttgaagaacgttgttgccttaggttgtggtttcgtcgaaggtctaggctggggtaacaacgcttctgctgccatccaaagagtcggtttgggtgagatcatcagattcggtcaaatgtttttcccagaatctagagaagaaacatactaccaagagtctgctggtgttgctgatttgatcaccacctgcgctggtggtagaaacgtcaaggttgctaggctaatggctacttctggtaaggacgcctgggaatgtgaaaaggagttgttgaatggccaatccgctcaaggtttaattacctgcaaagaagttcacgaatggttggaaacatgtggctctgtcgaagacttcccattatttgaagccgtataccaaatcgtttacaacaactacccaatgaagaacctgccggacatgattgaagaattagatctacatgaagattag

SEQ ID NO: 1853 - DNA, 4126 bp, Artificial Sequence
  construct 1/2 for ihol1: pGAL7 < NCP1; plasmid 1/2 for ihol1: pGAL7 < GPD1
taactataacggtcctaaggtagcgaactgaagcagtaccaagaaatggcactttttgtttatatgacatagtaaaagtgttcatttggcagaaaacaagggtatctggatactgcaatcctcattagttgcggagagcttttttaaagttttattacttcgataatgctttcctccagaactgggcgcgcactgaagccataaactgagtggttgtccctgtgtatattctacaatcgcctatttgaaacttctgggtgataatatcgatttagcgattgggtttctcccttctgagattctggataaatgagatgctaccctcacagtaaaaacagtacaaaacctttgtatagttctagtcaaatatgaactccttcattcatggattgtatactattgttcttgttgaaagattcctcttgtgattttcatggtgattttaagccttttttattgaaagaattaaatattcactaggctgcgatacgatagacaaacgaagtgattgaaacccgaattaacggaacattgcgaggtaagcgcggtccaacttaggcgtaaacctcgatgctacctactcagacccacctcgcgcggggtaaataaggcactcatcccagctggttcttggcgttctacgctttgtaacgatttgggagtccagagactcgctgttttcgaaatttgccctcaagcgcgagtattgaaccaggcttacgcccaagaacgtagcaagctgactcaaacaaaatacattttgcccgcgttacatatgaatcaagttggaagttgtgattctgggtagaagatcggtctgcattggatggtggtaacgcatttttttacacacattacttgcctcgagcatcaaatggtggttattcgtggatctatatcacgtgatttgcttaagaattgtcgttcatggtgacacttttagctttgacatgattaagctcatctcaattgatgttatctaaagtcatttcaactatctaagatgtggttgtgattgggccattttgtgaaagccagtacgccagcgtcaatacactcccgtcaattagttgcaccatgtccacaaaatcatataccagtagagctgagactcatgcaagtccggttgcatcgaaacttttacgtttaatggatgaaaagaagaccaatttgtgtgcttctcttgacgttcgttcgactgatgagctattgaaacttgttgaaacgttgggtccatacatttgccttttgaaaacacacgttgatatcttggatgatttcagttatgagggtactgtcgttccattgaaagcattggcagagaaatacaagttcttgatatttgaggacagaaaattcgccgatatcggtaacacagtcaaattacaatatacatcgggcgtttaccgtatcgcagaatggtctgatatcaccaacgcccacggggttactggtgctggtattgttgctggcttgaaacaaggtgcgcaagaggtcaccaaagaaccaaggggattattgatgcttgctagggataacagggtaatatcggatcccgggcccgtcgactgcagaggcctgcatgcaagcttggcgtaatcatggtcatagctgtttcctgtgtgaaattgttatccgctcacaattccacacaacatacgagccggaagcataaagtgtaaagcctggggtgcctaatgagtgagctaactcacattaattgcgttgcgctcactgcccgctttccagtcgggaaacctgtcgtgccagctgcattaatgaatcggccaacgcgcggggagaggcggtttgcgtattgggcgctcttccgcttcctcgctcactgactcgctgcgctcggtcgttcggctgcggcgagcggtatcagctcactcaaaggcggtaatacggttatccacagaatcaggggataacgcaggaaagaacatgtgagcaaaaggccagcaaaaggccaggaaccgtaaaaaggccgcgttgctggcgtttttccataggctccgcccccctgacgagcatcacaaaaatcgacgctcaagtcagaggtggcgaaacccgacaggactataaagataccaggcgtttccccctggaagctccctcgtgcgctctcctgttccgaccctgccgcttaccggatacctgtccgcctttctcccttcgggaagcgtggcgctttctcatagctcacgctgtaggtatctcagttcggtgtaggtcgttcgctccaagctgggctgtgtgcacgaaccccccgttcagcccgaccgctgcgccttatccggtaactatcgtcttgagtccaacccggtaagacacgacttatcgccactggcagcagccactggtaacaggattagcagagcgaggtatgtaggcggtgctacagagttcttgaagtggtggcctaactacggctacactagaagaacagtatttggtatctgcgctctgctgaagccagttaccttcggaaaaagagttggtagctcttgatccggcaaacaaaccaccgctggtagcggtggtttttttgtttgcaagcagcagattacgcgcagaaaaaaaggatctcaagaagatcctttgatcttttctacggggtctgacgctcagtggaacgaaaactcacgttaagggattttggtcatgagattatcaaaaaggatcttcacctagatccttttaaattaaaaatgaagttttaaatcaagcccaatctgaataatgttacaaccaattaaccaattctgattagaaaaactcatcgagcatcaaatgaaactgcaatttattcatatcaggattatcaataccatatttttgaaaaagccgtttctgtaatgaaggagaaaactcaccgaggcagttccataggatggcaagatcctggtatcggtctgcgattccgactcgtccaacatcaatacaacctattaatttcccctcgtcaaaaataaggttatcaagtgagaaatcaccatgagtgacgactgaatccggtgagaatggcaaaagtttatgcatttctttccagacttgttcaacaggccagccattacgctcgtcatcaaaatcactcgcatcaaccaaaccgttattcattcgtgattgcgcctgagcgagacgaaatacgcgatcgctgttaaaaggacaattacaaacaggaatcgaatgcaaccggcgcaggaacactgccagcgcatcaacaatattttcacctgaatcaggatattcttctaatacctggaatgctgtttttccggggatcgcagtggtgagtaaccatgcatcatcaggagtacggataaaatgcttgatggtcggaagaggcataaattccgtcagccagtttagtctgaccatctcatctgtaacatcattggcaacgctacctttgccatgtttcagaaacaactctggcgcatcgggcttcccatacaagcgatagattgtcgcacctgattgcccgacattatcgcgagcccatttatacccatataaatcagcatccatgttggaatttaatcgcggcctcgacgtttcccgttgaatatggctcataacaccccttgtattactgtttatgtaagcagacagttttattgttcatgatgatatatttttatcttgtgcaatgtaacatcagagattttgagacacgggccagagctgcatcgcgcgtttcggtgatgacggtgaaaacctctgacacatgcagctcccggagacggtcacagcttgtctgtaagcggatgccgggagcagacaagcccgtcagggcgcgtcagcgggtgttggcgggtgtcggggctggcttaactatgcggcatcagagcagattgtactgagagtgcaccatatgcggtgtgaaataccgcacagatgcgtaaggagaaaataccgcatcaggcgccattcgccattcaggctgcgcaactgttgggaagggcgatcggtgcgggcctcttcgctattacgccagctggcgaaagggggatgtgctgcaaggcgattaagttgggtaacgccagggttttcccagtcacgacgttgtaaaacgacggccagtgaattcgagctcggtacctcgcgaatgcatctagat

SEQ ID NO: 1854 - DNA, 5736 bp, Artificial Sequence
  construct for pYEF3 < QCR9
aaatacaaatccaagaaacctcgatgaggatgactctgatgataatgatgactctgatgagcgagagatttggtagattcaagccctctactatgttttatagttgacatatttgtatataaaaacttatacattattaaacatttgcgcgtcgattgacttttatttattattaacaaagaagtaataccaacctaattacaaatacttcgaagtgactatcataagtttccttatctagcgaaggcaacttttgaactccccagttgttaatatgtatcattatacacgacccaatcaaacgcggggaagtcaatgccgaaagaattctaggacctaaaagctgctcaatccttgggcctttccctaatgacatcccctctcaaactttagcttagcagttgtatttaatgtcctgtcacggatagtcaataatcgttgaaggttgattttcatatccttcgcaatttcgtaaagcaacaatagcaatacggactaaatttgcctcaacatctcctgcttgccgccacatgaaatctttgctatcacaaatcgcgaagagttgtgattctgggtagaagatcggtctgcattggatggtggtaacgcatttttttacacacattacttgcctcgagcatcaaatggtggttattcgtggatctatatcacgtgatttgcttaagaattgtcgttcatggtgacacttttagctttgacatgattaagctcatctcaattgatgttatctaaagtcatttcaactatctaagatgtggttgtgattgggccattttgtgaaagccagtacgccagcgtcaatacactcccgtcaattagttgcaccatgtccacaaaatcatataccagtagagctgagactcatgcaagtccggttgcatcgaaacttttacgtttaatggatgaaaagaagaccaatttgtgtgcttctcttgacgttcgttcgactgatgagctattgaaacttgttgaaacgttgggtccatacatttgccttttgaaaacacacgttgatatcttggatgatttcagttatgagggtactgtcgttccattgaaagcattggcagagaaatacaagttcttgatatttgaggacagaaaattcgccgatatcggtaacacagtcaaattacaatatacatcgggcgtttaccgtatcgcagaatggtctgatatcaccaacgcccacggggttactggtgctggtattgttgctggcttgaaacaaggtgcgcaagaggtcaccaaagaaccaaggggattattgatgcttgctgaattgtcttccaagggttctctagcacacggtgaatatactaagggtaccgttgatattgcaaagagtgataaagatttcgttattgggttcattgctcagaacgatatgggaggaagagaagaagggtttgattggctaatcatgaccccaggtgtaggtttagacgacaaaggcgatgcattgggtcagcagtacagaaccgtcgacgaagttgtaagtggtggatcagatatcatcattgttggcagaggacttttcgccaagggtagagatcctaaggttgaaggtgaaagatacagaaatgctggatgggaagcgtaccaaaagagaatcagcgctccccattaattatacaggaaacttaatagaacaaatcacatatttaatctaatagccacctgcattggcacggtgcaacactacttcaacttcatcttacaaaaagatcacgtgatctgttgtattgaactgaaaattttttgtttgcttctctctctctctctttcattatgtgagatttaaaaaccagaaactacatcatcgaatccttgggcctttccctaatgacatcccctctcaaactttagcttagcagttgtatttaatgtcctgtcacggatagtcaataatcgttgaaggttgattttcatatccttcgcaatttcgtaaagcaacaatagcaatacggactaaaacaggccccttttcctttgtcgatatcatgtaattagttatgtcacgcttacattcacgccctccccccacatccgctctaaccgaaaaggaaggagttagacaacctgaagtctaggtccctatttatttttttatagttatgttagtattaagaacgttatttatatttcaaatttttcttttttttctgtacaaacgcgtgtacgcatgtaacattatactgaaaaccttgcttgagaaggttttgggacgctcgaaggctttaatttgcaagcttcgcagtttacactctcatcgtcgctctcatcatcgcttccgttgttcaactttcccttctgtttcaatctttttacctattcctttttaaaagatatatatacattaaactccttctacaagtatatattttatacatatctacagggcgtatatatacataacattttaagataagcaagtgaatgttgattcccgtttcttagtcaacacttctttctattttacccggtcgttaccctattaaaaaaacaacttacaatcattgttcgccccttccatacttactgccactcgcaaaagggcccaaccagggcaattacgtatcaaaaaatcatgacaggctgggtaataaatattcgtgaagaaagaagaaattaaaaaaagaaacgaagaagcaaaaaaaagaaaagactccgtttaatcactttcaaccgcggtttatccggccccacccatgcataaccctaaattattagatcacttagcacgtgaaaaagaaacgtttttaatgttttttttttttttttctttttctttttttgcgttggtgaaaattttttcgcttcctcgagtataattatctcatctcatctttcatataagataagaagttttataaaaaccttttgcatcaaaattttgtagaatatctctttttcttacgctctctttctttccttaattgttttctaaagaaccgtgtatttttctagttcgaatccatcgataacattaaaagatggtatgttggtgtgtgtgtgtgctgcttcacatttcaggctaaaaatgttatccgtggaatcttccttagccaagtatcatgggctttggaaattagtttcccaccgatgagcgcaacgacttagcgaagcttatgaaattggtgacagcagctctatgaatatgttccatgcgtttccattcaggttactaacaatgcataaattatgagtagtctttttcatcactatataaaacctttttcaaacgaaacgctgtttttgttggtactatctttgcaggtgcctttgttttccaaactgtatttgatactgctattacttcatggtacgagaatcacaacaaaggaaaattatggaaagatgtcaaggctcgaatagctgcaggcgatggagacgacgatgatgagtaaacgctgattatgtcacacatatacgtgcaaacgctctctctctctctcaagctatataagtggcactcgtcttatttattattttttaactataacggtcctaaggtagcgatcctcgctcactgactcgctgcgctcggtcgttcggctgcggcgagcggtatcagctcactcaaaggcggtaatacggttatccacagaatcaggggataacgcaggaaagaacatgtgagcaaaaggccagcaaaaggccaggaaccgtaaaaaggccgcgttgctggcgtttttccataggctccgcccccctgacgagcatcacaaaaatcgacgctcaagtcagaggtggcgaaacccgacaggactataaagataccaggcgtttccccctggaagctccctcgtgcgctctcctgttccgaccctgccgcttaccggatacctgtccgcctttctcccttcgggaagcgtggcgctttctcatagctcacgctgtaggtatctcagttcggtgtaggtcgttcgctccaagctgggctgtgtgcacgaaccccccgttcagcccgaccgctgcgccttatccggtaactatcgtcttgagtccaacccggtaagacacgacttatcgccactggcagcagccactggtaacaggattagcagagcgaggtatgtaggcggtgctacagagttcttgaagtggtggcctaactacggctacactagaagaacagtatttggtatctgcgctctgctgaagccagttaccttcggaaaaagagttggtagctcttgatccggcaaacaaaccaccgctggtagcggtggtttttttgtttgcaagcagcagattacgcgcagaaaaaaaggatctcaagaagatcctttgatcttttctacggggtctgacgctcagtggaacgaaaactcacgttaagggattttggtcatgagattatcaaaaaggatcttcacctagatccttttaaattaaaaatgaagttttaaatcaatctaaagtatatatgagtaaacttggtctgacagttaccaatgcttaatcagtgaggcacctatctcagcgatctgtctatttcgttcatccatagttgcctgactccccgtcgtgtagataactacgatacgggagggcttaccatctggccccagtgctgcaatgataccgcgagacccacgctcaccggctccagatttatcagcaataaaccagccagccggaagggccgagcgcagaagtggtcctgcaactttatccgcctccatccagtctattaattgttgccgggaagctagagtaagtagttcgccagttaatagtttgcgcaacgttgttgccattgctacaggcatcgtggtgtcacgctcgtcgtttggtatggcttcattcagctccggttcccaacgatcaaggcgagttacatgatcccccatgttgtgcaaaaaagcggttagctccttcggtcctccgatcgttgtcagaagtaagttggccgcagtgttatcactcatggttatggcagcactgcataattctcttactgtcatgccatccgtaagatgcttttctgtgactggtgagtactcaaccaagtcattctgagaatagtgtatgcggcgaccgagttgctcttgcccggcgtcaatacgggataataccgcgccacatagcagaactttaaaagtgctcatcattggaaaacgttcttcggggcgaaaactctcaaggatcttaccgctgttgagatccagttcgatgtaacccactcgtgcacccaactgatcttcagcatcttttactttcaccagcgtttctgggtgagcaaaaacaggaaggcaaaatgccgcaaaaaagggaataagggcgacacggaaatgttgaatactcatactcttcctttttcaatattattgaagcatttatcagggttattgtctcatgagcggatacatatttgaatgtatttagaaaaataaacaaataggggttccgcgcacatttccccgaaaagtgccacctgacgtctaagaaaccattattatcatgacattaacctataaaaataggcgtatcacgaggccctttcgtctcgcgcgtttcggtgatgacggtgaaaacctctgacacatgcagctcccggagacggtcacagcttgtctgtaagcggatgccgggagcagacaagcccgtcagggcgcgtcagcgggtgttggcgggtgtcggggctggcttaactatgcggcatcagagcagattgtactgagagtgcactagggataacagggtaat

SEQ ID NO: 1855 - DNA, 4736 bp, Artificial Sequence
  construct for dFMS1
aatctaggtactgatactggattgccctcagatgttcttgatactgtcagtaaaatagggaactctcctaatgtgtttgatgatgatttattttccaatttattatggtttgaccaaaattttgcataaggattctttttctattccataaaaccattttatggacacgtttacctacatattattatattgtatataagatgttgaaaaaattgagtcaacctcaccttaccacatgttggtccgttgctatgacaaactctcgttttacaagaaggaggctcaaatttcgggtcacccacccatatacggatgtcacgctatgagatcttttaaacaatagacaatttttggtatcctaaagatataaaagaggagtttttttaaaccatggtaactattttcaaatttgctctgctgcagttttttatttctgtttttctttttttgttcccaacaagaagtgagttaataaaggcaaaaacagtggtcgtgtgagatttgcctcaacatctcctgctagaaatgattcccgagtcgcgctatcacaaatcgcgaagagttgtgattctgggtagaagatcggtctgcattggatggtggtaacgcatttttttacacacattacttgcctcgagcatcaaatggtggttattcgtggatctatatcacgtgatttgcttaagaattgtcgttcatggtgacacttttagctttgacatgattaagctcatctcaattgatgttatctaaagtcatttcaactatctaagatgtggttgtgattgggccattttgtgaaagccagtacgccagcgtcaatacactcccgtcaattagttgcaccatgtccacaaaatcatataccagtagagctgagactcatgcaagtccggttgcatcgaaacttttacgtttaatggatgaaaagaagaccaatttgtgtgcttctcttgacgttcgttcgactgatgagctattgaaacttgttgaaacgttgggtccatacatttgccttttgaaaacacacgttgatatcttggatgatttcagttatgagggtactgtcgttccattgaaagcattggcagagaaatacaagttcttgatatttgaggacagaaaattcgccgatatcggtaacacagtcaaattacaatatacatcgggcgtttaccgtatcgcagaatggtctgatatcaccaacgcccacggggttactggtgctggtattgttgctggcttgaaacaaggtgcgcaagaggtcaccaaagaaccaaggggattattgatgcttgctgaattgtcttccaagggttctctagcacacggtgaatatactaagggtaccgttgatattgcaaagagtgataaagatttcgttattgggttcattgctcagaacgatatgggaggaagagaagaagggtttgattggctaatcatgaccccaggtgtaggtttagacgacaaaggcgatgcattgggtcagcagtacagaaccgtcgacgaagttgtaagtggtggatcagatatcatcattgttggcagaggacttttcgccaagggtagagatcctaaggttgaaggtgaaagatacagaaatgctggatgggaagcgtaccaaaagagaatcagcgctccccattaattatacaggaaacttaatagaacaaatcacatatttaatctaatagccacctgcattggcacggtgcaacactacttcaacttcatcttacaaaaagatcacgtgatctgttgtattgaactgaaaattttttgtttgcttctctctctctctctttcattatgtgagatttaaaaaccagaaactacatcatcgattggtatcctaaagatataaaagaggagtttttttaaaccatggtaactattttcaaatttgctctgctgcagttttttatttctgtttttctttttttgttcccaacaagaagtgagttaataaaggcaaaaacagtggtcgtgtgagagaaacgcttcaggtgtgccaaatctattttttcgaaattacttacacttttgacggctagaaaaggatatacatacatattaaaatttttagtaacactctgtgctttttcaaaaatttgaggtacacctaattctcccacttgttgcttataccaagtttgaacaattttaatgttaagcacaatagattggaatattatcatatggtggttcagagagtagtagggtgcattttcattcctgttgcctcaatgtgttttctatctgtatttacgtgattttatgaagtggtggcatcgcttagatgtggtgcataattagagactaatttttgaaaccacgcatgaatgtcaagtaattctaactgagcatctgtcatcaatggcacttgcaacttcaaaaaatcccaccaatattttgacggcaccaatttacctttgaattttatttgagttttccttgttaatcttgcattcagaattccatagaaaaagaatttttcaaatggaattatatttgtaactataacggtcctaaggtagcgatcctcgctcactgactcgctgcgctcggtcgttcggctgcggcgagcggtatcagctcactcaaaggcggtaatacggttatccacagaatcaggggataacgcaggaaagaacatgtgagcaaaaggccagcaaaaggccaggaaccgtaaaaaggccgcgttgctggcgtttttccataggctccgcccccctgacgagcatcacaaaaatcgacgctcaagtcagaggtggcgaaacccgacaggactataaagataccaggcgtttccccctggaagctccctcgtgcgctctcctgttccgaccctgccgcttaccggatacctgtccgcctttctcccttcgggaagcgtggcgctttctcatagctcacgctgtaggtatctcagttcggtgtaggtcgttcgctccaagctgggctgtgtgcacgaaccccccgttcagcccgaccgctgcgccttatccggtaactatcgtcttgagtccaacccggtaagacacgacttatcgccactggcagcagccactggtaacaggattagcagagcgaggtatgtaggcggtgctacagagttcttgaagtggtggcctaactacggctacactagaagaacagtatttggtatctgcgctctgctgaagccagttaccttcggaaaaagagttggtagctcttgatccggcaaacaaaccaccgctggtagcggtggtttttttgtttgcaagcagcagattacgcgcagaaaaaaaggatctcaagaagatcctttgatcttttctacggggtctgacgctcagtggaacgaaaactcacgttaagggattttggtcatgagattatcaaaaaggatcttcacctagatccttttaaattaaaaatgaagttttaaatcaatctaaagtatatatgagtaaacttggtctgacagttaccaatgcttaatcagtgaggcacctatctcagcgatctgtctatttcgttcatccatagttgcctgactccccgtcgtgtagataactacgatacgggagggcttaccatctggccccagtgctgcaatgataccgcgagacccacgctcaccggctccagatttatcagcaataaaccagccagccggaagggccgagcgcagaagtggtcctgcaactttatccgcctccatccagtctattaattgttgccgggaagctagagtaagtagttcgccagttaatagtttgcgcaacgttgttgccattgctacaggcatcgtggtgtcacgctcgtcgtttggtatggcttcattcagctccggttcccaacgatcaaggcgagttacatgatcccccatgttgtgcaaaaaagcggttagctccttcggtcctccgatcgttgtcagaagtaagttggccgcagtgttatcactcatggttatggcagcactgcataattctcttactgtcatgccatccgtaagatgcttttctgtgactggtgagtactcaaccaagtcattctgagaatagtgtatgcggcgaccgagttgctcttgcccggcgtcaatacgggataataccgcgccacatagcagaactttaaaagtgctcatcattggaaaacgttcttcggggcgaaaactctcaaggatcttaccgctgttgagatccagttcgatgtaacccactcgtgcacccaactgatcttcagcatcttttactttcaccagcgtttctgggtgagcaaaaacaggaaggcaaaatgccgcaaaaaagggaataagggcgacacggaaatgttgaatactcatactcttcctttttcaatattattgaagcatttatcagggttattgtctcatgagcggatacatatttgaatgtatttagaaaaataaacaaataggggttccgcgcacatttccccgaaaagtgccacctgacgtctaagaaaccattattatcatgacattaacctataaaaataggcgtatcacgaggccctttcgtctcgcgcgtttcggtgatgacggtgaaaacctctgacacatgcagctcccggagacggtcacagcttgtctgtaagcggatgccgggagcagacaagcccgtcagggcgcgtcagcgggtgttggcgggtgtcggggctggcttaactatgcggcatcagagcagattgtactgagagtgcactagggataacagggtaat

SEQ ID NO: 1856 - DNA, 5641 bp, Artificial Sequence
  construct for pTHD3 < QCR9
tgatgatctacaaaaaatcaggaaatattatgaaaaagtatagggaatatttcttatggacaatttgtattttaatattgttatattgcaatatatatgtgtattataggttttaaaccatataaaggttagtacatgaagaagtgtgtacagttatggcaataactgttctcttccgttttaaagagagtattatcacggtctgaaaattaagcaaaaaaagaaaagcgtgcacttaaaaatcggtggtggacagaccgcatattccataaacatagatggtacaagggcattatgagtccttgaatagaaaaaatgatgaaagaatgaatgcaattccgtattgcgacactggcgaagtgttcgaggctgacacgatagcgaatgtatggaaaagagaagataaggaatggttaaaaaggactcaaagtgatcgaagtggatacgagtatccacgactaggagaatcaccatatatcaatatgacagacgacttcagatttgcctcaacatctcctgctgctgtgactacattcgtcgggctatcacaaatcgcgaagagttgtgattctgggtagaagatcggtctgcattggatggtggtaacgcatttttttacacacattacttgcctcgagcatcaaatggtggttattcgtggatctatatcacgtgatttgcttaagaattgtcgttcatggtgacacttttagctttgacatgattaagctcatctcaattgatgttatctaaagtcatttcaactatctaagatgtggttgtgattgggccattttgtgaaagccagtacgccagcgtcaatacactcccgtcaattagttgcaccatgtccacaaaatcatataccagtagagctgagactcatgcaagtccggttgcatcgaaacttttacgtttaatggatgaaaagaagaccaatttgtgtgcttctcttgacgttcgttcgactgatgagctattgaaacttgttgaaacgttgggtccatacatttgccttttgaaaacacacgttgatatcttggatgatttcagttatgagggtactgtcgttccattgaaagcattggcagagaaatacaagttcttgatatttgaggacagaaaattcgccgatatcggtaacacagtcaaattacaatatacatcgggcgtttaccgtatcgcagaatggtctgatatcaccaacgcccacggggttactggtgctggtattgttgctggcttgaaacaaggtgcgcaagaggtcaccaaagaaccaaggggattattgatgcttgctgaattgtcttccaagggttctctagcacacggtgaatatactaagggtaccgttgatattgcaaagagtgataaagatttcgttattgggttcattgctcagaacgatatgggaggaagagaagaagggtttgattggctaatcatgaccccaggtgtaggtttagacgacaaaggcgatgcattgggtcagcagtacagaaccgtcgacgaagttgtaagtggtggatcagatatcatcattgttggcagaggacttttcgccaagggtagagatcctaaggttgaaggtgaaagatacagaaatgctggatgggaagcgtaccaaaagagaatcagcgctccccattaattatacaggaaacttaatagaacaaatcacatatttaatctaatagccacctgcattggcacggtgcaacactacttcaacttcatcttacaaaaagatcacgtgatctgttgtattgaactgaaaattttttgtttgcttctctctctctctctttcattatgtgagatttaaaaaccagaaactacatcatcgaactggcgaagtgttcgaggctgacacgatagcgaatgtatggaaaagagaagataaggaatggttaaaaaggactcaaagtgatcgaagtggatacgagtatccacgactaggagaatcaccatatatcaatatgacagacgacttcagaacaggccccttttcctttgtcgatatcatgtaattagttatgtcacgcttacattcacgccctccccccacatccgctctaaccgaaaaggaaggagttagacaacctgaagtctaggtccctatttatttttttatagttatgttagtattaagaacgttatttatatttcaaatttttcttttttttctgtacaaacgcgtgtacgcatgtaacattatactgaaaaccttgcttgagaaggttttgggacgctcgaaggctttaatttgcaagcttcgcagtttacactctcatcgtcgctctcatcatcgcttccgttgttttagtcaaaaaattagccttttaattctgctgtaacccgtacatgcccaaaatagggggcgggttacacagaatatataacatcgtaggtgtctgggtgaacagtttattcctggcatccactaaatataatggagcccgctttttaagctggcatccagaaaaaaaaagaatcccagcaccaaaatattgttttcttcaccaaccatcagttcataggtccattctcttagcgcaactacagagaacaggggcacaaacaggcaaaaaacgggcacaacctcaatggagtgatgcaacctgcctggagtaaatgatgacacaaggcaattgacccacgcatgtatctatctcattttcttacaccttctattaccttctgctctctctgatttggaaaaagctgaaaaaaaaggttgaaaccagttccctgaaattattcccctacttgactaataagtatataaagacggtaggtattgattgtaattctgtaaatctatttcttaaacttcttaaattctacttttatagttagtcttttttttagttttaaaacaccaagaacttagtttcgaataaacacacataaacaaacaaaatggaaaagaaggtaatatgtcaagatatcttttggtcatgtgatggtacatcgtttgtttctgtgcataatgattttggcatcagacaatatttagtgccggaggaaagtaatacggacaagctaaacagaaacctccttctaccatttacaaggttttttagaaaccagtctattgtttcatgtgcaatagacccgttttacacgctttataacgagaattccgacaggttagctggtgacagaatcgtggttggaggaaaaaacttccctctacaactatactctttgatggacgggcagtgtatcctcagctatgacacgatgaacaaaataaatggagaatacgaaactgtatacagtgtgaaaatcgatgttgagtctcgtgtatacactggctcatgccgtaacaaagtggcgatatacgacaagagcagacgagatgccgtgtggatgaaccagagtaccaaaaaagcaagcaagggaagacaaagcattattaactataacggtcctaaggtagcgatcctcgctcactgactcgctgcgctcggtcgttcggctgcggcgagcggtatcagctcactcaaaggcggtaatacggttatccacagaatcaggggataacgcaggaaagaacatgtgagcaaaaggccagcaaaaggccaggaaccgtaaaaaggccgcgttgctggcgtttttccataggctccgcccccctgacgagcatcacaaaaatcgacgctcaagtcagaggtggcgaaacccgacaggactataaagataccaggcgtttccccctggaagctccctcgtgcgctctcctgttccgaccctgccgcttaccggatacctgtccgcctttctcccttcgggaagcgtggcgctttctcatagctcacgctgtaggtatctcagttcggtgtaggtcgttcgctccaagctgggctgtgtgcacgaaccccccgttcagcccgaccgctgcgccttatccggtaactatcgtcttgagtccaacccggtaagacacgacttatcgccactggcagcagccactggtaacaggattagcagagcgaggtatgtaggcggtgctacagagttcttgaagtggtggcctaactacggctacactagaagaacagtatttggtatctgcgctctgctgaagccagttaccttcggaaaaagagttggtagctcttgatccggcaaacaaaccaccgctggtagcggtggtttttttgtttgcaagcagcagattacgcgcagaaaaaaaggatctcaagaagatcctttgatcttttctacggggtctgacgctcagtggaacgaaaactcacgttaagggattttggtcatgagattatcaaaaaggatcttcacctagatccttttaaattaaaaatgaagttttaaatcaatctaaagtatatatgagtaaacttggtctgacagttaccaatgcttaatcagtgaggcacctatctcagcgatctgtctatttcgttcatccatagttgcctgactccccgtcgtgtagataactacgatacgggagggcttaccatctggccccagtgctgcaatgataccgcgagacccacgctcaccggctccagatttatcagcaataaaccagccagccggaagggccgagcgcagaagtggtcctgcaactttatccgcctccatccagtctattaattgttgccgggaagctagagtaagtagttcgccagttaatagtttgcgcaacgttgttgccattgctacaggcatcgtggtgtcacgctcgtcgtttggtatggcttcattcagctccggttcccaacgatcaaggcgagttacatgatcccccatgttgtgcaaaaaagcggttagctccttcggtcctccgatcgttgtcagaagtaagttggccgcagtgttatcactcatggttatggcagcactgcataattctcttactgtcatgccatccgtaagatgcttttctgtgactggtgagtactcaaccaagtcattctgagaatagtgtatgcggcgaccgagttgctcttgcccggcgtcaatacgggataataccgcgccacatagcagaactttaaaagtgctcatcattggaaaacgttcttcggggcgaaaactctcaaggatcttaccgctgttgagatccagttcgatgtaacccactcgtgcacccaactgatcttcagcatcttttactttcaccagcgtttctgggtgagcaaaaacaggaaggcaaaatgccgcaaaaaagggaataagggcgacacggaaatgttgaatactcatactcttcctttttcaatattattgaagcatttatcagggttattgtctcatgagcggatacatatttgaatgtatttagaaaaataaacaaataggggttccgcgcacatttccccgaaaagtgccacctgacgtctaagaaaccattattatcatgacattaacctataaaaataggcgtatcacgaggccctttcgtctcgcgcgtttcggtgatgacggtgaaaacctctgacacatgcagctcccggagacggtcacagcttgtctgtaagcggatgccgggagcagacaagcccgtcagggcgcgtcagcgggtgttggcgggtgtcggggctggcttaactatgcggcatcagagcagattgtactgagagtgcactagggataacagggtaat

SEQ ID NO: 1857 - DNA, 4736 bp, Artificial Sequence
  construct for dSUR2
cacagggctagtctttattactgccgctgctgctgctgccgctgctactgctgctgttgtgtgacttgaaacgcgttttatcctcctcaccttatcgtcatttctctatctttttcacttgcacagcttaataagcttttcgacctcctgtttcctattgtcttattccctcaccccgcgtccttcttcgggcagtcgcgcttttctccggcttctgcggtttttcttagtctttccgcaccaattttcacagaaaaatttctttttgggttactaaaaatttcttgtttgctattgtcttgatttatttcactctttcttcatcctgctgcgctgttgttgccgcatttttcgtttcgtgttttgggattataaaagaagtaacgatttacatatcttctattcccttgcatttactccgggtcttcgtctttactgtttggtctgggtatttctaacattctagtccgaagagggtgtatacgaaaagaaaatatacgtttgcctcaacatctcctgcttgagcctacctcatctgcgagctatcacaaatcgcgaagagttgtgattctgggtagaagatcggtctgcattggatggtggtaacgcatttttttacacacattacttgcctcgagcatcaaatggtggttattcgtggatctatatcacgtgatttgcttaagaattgtcgttcatggtgacacttttagctttgacatgattaagctcatctcaattgatgttatctaaagtcatttcaactatctaagatgtggttgtgattgggccattttgtgaaagccagtacgccagcgtcaatacactcccgtcaattagttgcaccatgtccacaaaatcatataccagtagagctgagactcatgcaagtccggttgcatcgaaacttttacgtttaatggatgaaaagaagaccaatttgtgtgcttctcttgacgttcgttcgactgatgagctattgaaacttgttgaaacgttgggtccatacatttgccttttgaaaacacacgttgatatcttggatgatttcagttatgagggtactgtcgttccattgaaagcattggcagagaaatacaagttcttgatatttgaggacagaaaattcgccgatatcggtaacacagtcaaattacaatatacatcgggcgtttaccgtatcgcagaatggtctgatatcaccaacgcccacggggttactggtgctggtattgttgctggcttgaaacaaggtgcgcaagaggtcaccaaagaaccaaggggattattgatgcttgctgaattgtcttccaagggttctctagcacacggtgaatatactaagggtaccgttgatattgcaaagagtgataaagatttcgttattgggttcattgctcagaacgatatgggaggaagagaagaagggtttgattggctaatcatgaccccaggtgtaggtttagacgacaaaggcgatgcattgggtcagcagtacagaaccgtcgacgaagttgtaagtggtggatcagatatcatcattgttggcagaggacttttcgccaagggtagagatcctaaggttgaaggtgaaagatacagaaatgctggatgggaagcgtaccaaaagagaatcagcgctccccattaattatacaggaaacttaatagaacaaatcacatatttaatctaatagccacctgcattggcacggtgcaacactacttcaacttcatcttacaaaaagatcacgtgatctgttgtattgaactgaaaattttttgtttgcttctctctctctctctttcattatgtgagatttaaaaaccagaaactacatcatcgattcgtttcgtgttttgggattataaaagaagtaacgatttacatatcttctattcccttgcatttactccgggtcttcgtctttactgtttggtctgggtatttctaacattctagtccgaagagggtgtatacgaaaagaaaatatacggaaacgcttcaggtgtgccacccttttgcatacctcccgttcaattgctgggtaaaggcaatgtctccgacttcccacgtttgtatttattatccatttatatacatcaagacatattattaagtgtataggcgtgactttgactatatatttgatttgtaacgaaagaatacatcaaaattcaactatgaaatggttattattgtgcatgcacatcttgaattatcaaaaaggtcttaaatgttcttcggactttcttgaaatcttcgaaaactgatgagaattcttcattatttttttttttcttcttttattattttttatgtttattccatatatacacttataatttttttttttgcgattaatataagtttgcctggatacacgaacatatatatgattaaaatggttgtctcgaacaaaaaaattcactttttagaggggtttcttatttattcgtatatgtacgtaattttgatgtttaggaaaaattcacggaaaagaatatatatttgaataactataacggtcctaaggtagcgatcctcgctcactgactcgctgcgctcggtcgttcggctgcggcgagcggtatcagctcactcaaaggcggtaatacggttatccacagaatcaggggataacgcaggaaagaacatgtgagcaaaaggccagcaaaaggccaggaaccgtaaaaaggccgcgttgctggcgtttttccataggctccgcccccctgacgagcatcacaaaaatcgacgctcaagtcagaggtggcgaaacccgacaggactataaagataccaggcgtttccccctggaagctccctcgtgcgctctcctgttccgaccctgccgcttaccggatacctgtccgcctttctcccttcgggaagcgtggcgctttctcatagctcacgctgtaggtatctcagttcggtgtaggtcgttcgctccaagctgggctgtgtgcacgaaccccccgttcagcccgaccgctgcgccttatccggtaactatcgtcttgagtccaacccggtaagacacgacttatcgccactggcagcagccactggtaacaggattagcagagcgaggtatgtaggcggtgctacagagttcttgaagtggtggcctaactacggctacactagaagaacagtatttggtatctgcgctctgctgaagccagttaccttcggaaaaagagttggtagctcttgatccggcaaacaaaccaccgctggtagcggtggtttttttgtttgcaagcagcagattacgcgcagaaaaaaaggatctcaagaagatcctttgatcttttctacggggtctgacgctcagtggaacgaaaactcacgttaagggattttggtcatgagattatcaaaaaggatcttcacctagatccttttaaattaaaaatgaagttttaaatcaatctaaagtatatatgagtaaacttggtctgacagttaccaatgcttaatcagtgaggcacctatctcagcgatctgtctatttcgttcatccatagttgcctgactccccgtcgtgtagataactacgatacgggagggcttaccatctggccccagtgctgcaatgataccgcgagacccacgctcaccggctccagatttatcagcaataaaccagccagccggaagggccgagcgcagaagtggtcctgcaactttatccgcctccatccagtctattaattgttgccgggaagctagagtaagtagttcgccagttaatagtttgcgcaacgttgttgccattgctacaggcatcgtggtgtcacgctcgtcgtttggtatggcttcattcagctccggttcccaacgatcaaggcgagttacatgatcccccatgttgtgcaaaaaagcggttagctccttcggtcctccgatcgttgtcagaagtaagttggccgcagtgttatcactcatggttatggcagcactgcataattctcttactgtcatgccatccgtaagatgcttttctgtgactggtgagtactcaaccaagtcattctgagaatagtgtatgcggcgaccgagttgctcttgcccggcgtcaatacgggataataccgcgccacatagcagaactttaaaagtgctcatcattggaaaacgttcttcggggcgaaaactctcaaggatcttaccgctgttgagatccagttcgatgtaacccactcgtgcacccaactgatcttcagcatcttttactttcaccagcgtttctgggtgagcaaaaacaggaaggcaaaatgccgcaaaaaagggaataagggcgacacggaaatgttgaatactcatactcttcctttttcaatattattgaagcatttatcagggttattgtctcatgagcggatacatatttgaatgtatttagaaaaataaacaaataggggttccgcgcacatttccccgaaaagtgccacctgacgtctaagaaaccattattatcatgacattaacctataaaaataggcgtatcacgaggccctttcgtctcgcgcgtttcggtgatgacggtgaaaacctctgacacatgcagctcccggagacggtcacagcttgtctgtaagcggatgccgggagcagacaagcccgtcagggcgcgtcagcgggtgttggcgggtgtcggggctggcttaactatgcggcatcagagcagattgtactgagagtgcactagggataacagggtaat

SEQ ID NO: 1858 - DNA, 7235 bp, Artificial Sequence
  construct 2/2 for ihol1: pGAL7 < NCP1
taactataacggtcctaaggtagcgaatatcaccaacgcccacggggttactggtgctggtattgttgctggcttgaaacaaggtgcgcaagaggtcaccaaagaaccaaggggattattgatgcttgctgaattgtcttccaagggttctctagcacacggtgaatatactaagggtaccgttgatattgcaaagagtgataaagatttcgttattgggttcattgctcagaacgatatgggaggaagagaagaagggtttgattggctaatcatgaccccaggtgtaggtttagacgacaaaggcgatgcattgggtcagcagtacagaaccgtcgacgaagttgtaagtggtggatcagatatcatcattgttggcagaggacttttcgccaagggtagagatcctaaggttgaaggtgaaagatacagaaatgctggatgggaagcgtaccaaaagagaatcagcgctccccattaattatacaggaaacttaatagaacaaatcacatatttaatctaatagccacctgcattggcacggtgcaacactacttcaacttcatcttacaaaaagatcacgtgatctgttgtattgaactgaaaattttttgtttgcttctctctctctctctttcattatgtgagatttaaaaaccagaaactacatcatcgatttgtaacgatttgggagtccagagactcgctgttttcgaaatttgccctcaagcgcgagtattgaaccaggcttacgcccaagaacgtagcaagctgactcaaacaaaatacattttgcccgcgttacatatgaatcaagttggaagttctcaggtaaggggctagtagatgcaatgaatgacgatgaagatagagcccaactgaaggctaggctgtggatccgtgtggaagaacgattacaacaggtgttgtcctctgaggacataaaatacacaccgagattcatcaactcattgctggagttagcatatctacaattgggtgaaatggggagcgatttgcaggcatttgctcggcatgccggtagaggtgtggtcaataagagcgacctcatgctatacctgagaaagcaacctgacctacaggaaagagttactcaagaataagaattttcgttttaaaacctaagagtcactttaaaatttgtatacacttattttttttataacttatttaataataaaaatcataaatcataagaaattcgcttaccagacatcttcttggtatctacctgaagtcttgagcatcttgattagctctgttgcttcatcagtggtaatggatttaccacgggataagatgccaaccaatgcggttgacacacccttggccataccctttgcatcaccacagacgtagataaatgcaccgttgttaatcatttcaaatacttggtcttcgtaatcctttaatttatcttgaacataaacttttttggtgtttggcaacctggaatgggccacgaccatttcgaacgaaccatccaattttttggcgtattctggccattcgtcctggtacaagaaatcatcagtgttacgggatccataaaacagtatatgcttacctagcgaaacgttgttaccgcccttcttttgtgattcgaggaacgcgacacgctctctgataaacccacggaatggggcaacaccggtacctggaccgatcatgataactggggtggaagggttggaaggcaatctgaagttagaacgacgaacgtggacgggcaatttgtaattggcgaaaagtttacgtgggccatttaaatcgtagtgaacaggtaggttagtttcggcaatgttaacattgttttgagccaattgaatgtttcttaacaagttagtcgtaacaccaacaactggaggagcatcaggcaattctgggttaggaaagttttccacaatggaggtgacatggacggtttgcttttcagacagagaagaggaagagatagagtagtaacgaggagtcatttggggaactgattcgaccaagaattgcatgggtacggtgtcccatttggcgccatcagacaaatatttcagagcatctgcgatgttgaaatatttggaggttatctcgacggcgaattggtccttgtctttcgaaagcagagtcaatttttccttgacgtcagcgttgggggcgaactgaatcaaagatgaaaacaattgtctggagacaggtcctgtaatttccaaatagtgtttaatagcagcgccaatagtagttggcgttgggaagggcactttgacggtgggatccaggggcttcaagtcaaaaatggtttcagggtccaggttgaatatggataagaactgttcgaccttttccaatgggttggaaggccaaacagcaagatggtcaccagtggagtacttgatgttagagccggacaagtcaaattcagagtggatgcaattacggtcattggaagagaacagttcgcgagatttcacgatgggtgcaatatacggttgagacaaatcgaagggacccaattggatgccgtctgcgttgcggttcaactgatgcgagggcaaatagtgagcagagggttcaccaagcgacatggagtcagtgatttcgttcaacacagtgtactggaattgagaggtgaacttggcttcctgttcgtccaaatgcagttcgtctttcaaaacctccaggatggagtccttccaggccatgtaatcttcgtctgtagttcctgcaccatcatcagcttcaccgagcttgcctagtctgatagcgcccgcggcggagagatgcttctcggccttcttggcggcaccattaaagaattcataagtagaatttcccagaccaaacatattatacctcaggttcgatagtgcacccgcttccgcattacaaataaagtcttcaaagttgaccgccccgtcggggaagtctccttcaccatatgtagagataaaaatcgagactatgacgggcacatcgtttagcgactcaaagtcgtagttctcaacatctgcgcacatcacgtttaggttgaacttggccaccagctccttggaaaactttttggcgtaatcctcggcagtcccagtctgcgacgcatacaacaccaagtagttcttgttgttttcggtcaccacctgagcaatgtctctgttgcccgagctgacagctgtgatatctccgtcatcggacatcagcagttccttgatggagtttctctttacgtacagtagcacggcaagcactagccccgccaggacagtgaagtcggtgttgtctattccaaacggcatttttgagggaatattcaactgtttttttttatcatgttgatgctctgcataataatgcccataaatatttccgacctgcttttatatctttgctagccaaactaactgaacatagctacacattattttcagcttggctattttgtgaacactgtatagccagtccttcggatcacggtcaacagttgtccgagcgctttttggaccctttcccttatttttgggttaaggaaaatgacagaaaatatatctaatgagccttcgctcaacagtgctccgaagtatagctttccaaaaggagaggcaaagcaatttaagaatgtatgaacaaaataaaggggaaaaattaccccctctactttaccaaacgaatactaccaataatatttacaacttttccttatgattttttcactgaagcgcttcgcaatagttgtgagtgatatcaaaagtaacgaaatgaactccgcggctcgtgctatattcttgttgctaccgtccatatctttccatagattttcaatttttgatgtctccatggtggtacagagaacttgtaaacaattcggtccctacatgtgaggaaattcgctgtgacacttttatcactgaactccaaatttaaaaaatagcataaaattcgttatacagcaaatctatgtgttgcaattaagaactaaaagatatagagtgcatattttcaagaaggatagtaagctggcaaagcagtaacgctcatcagcaaacgaaagagtttaaggctcgctaattcgcactgtcagggtcccttgggtgttttgcactagcgtcaggtaggctagtatgaatccgcgtatggttctgcctacgcaacactttagctgctttttttaagcagcggcagatgaggatttaaataacgcataaccaagaatatacctaatgaagtgaaggtatacaggctgttctatggacttgaataatactggctaccctggcgtcctaatgtcgttaagaaagtaacttgatatcagattaatcacaaacttggtccacaaaataccacttatctcatataatctaaatctgactaaagggtgtaggcacggaacttcggacctagaggtattgctcaatatgtatatttctcaatggttcatctaggtaagcaaggccttgaataatatacttaatcttgtctgtttcgcaacaattgctgagtacaataatgttggaataaaaatcaactatcatctactaactagtatttacgttactagtatattatcatatacggtgttagaagatgacgcaaatgatgagaaatagtcatctaaattagtggaagctgaaacgtagggataacagggtaatatcggatcccgggcccgtcgactgcagaggcctgcatgcaagcttggcgtaatcatggtcatagctgtttcctgtgtgaaattgttatccgctcacaattccacacaacatacgagccggaagcataaagtgtaaagcctggggtgcctaatgagtgagctaactcacattaattgcgttgcgctcactgcccgctttccagtcgggaaacctgtcgtgccagctgcattaatgaatcggccaacgcgcggggagaggcggtttgcgtattgggcgctcttccgcttcctcgctcactgactcgctgcgctcggtcgttcggctgcggcgagcggtatcagctcactcaaaggcggtaatacggttatccacagaatcaggggataacgcaggaaagaacatgtgagcaaaaggccagcaaaaggccaggaaccgtaaaaaggccgcgttgctggcgtttttccataggctccgcccccctgacgagcatcacaaaaatcgacgctcaagtcagaggtggcgaaacccgacaggactataaagataccaggcgtttccccctggaagctccctcgtgcgctctcctgttccgaccctgccgcttaccggatacctgtccgcctttctcccttcgggaagcgtggcgctttctcatagctcacgctgtaggtatctcagttcggtgtaggtcgttcgctccaagctgggctgtgtgcacgaaccccccgttcagcccgaccgctgcgccttatccggtaactatcgtcttgagtccaacccggtaagacacgacttatcgccactggcagcagccactggtaacaggattagcagagcgaggtatgtaggcggtgctacagagttcttgaagtggtggcctaactacggctacactagaagaacagtatttggtatctgcgctctgctgaagccagttaccttcggaaaaagagttggtagctcttgatccggcaaacaaaccaccgctggtagcggtggtttttttgtttgcaagcagcagattacgcgcagaaaaaaaggatctcaagaagatcctttgatcttttctacggggtctgacgctcagtggaacgaaaactcacgttaagggattttggtcatgagattatcaaaaaggatcttcacctagatccttttaaattaaaaatgaagttttaaatcaagcccaatctgaataatgttacaaccaattaaccaattctgattagaaaaactcatcgagcatcaaatgaaactgcaatttattcatatcaggattatcaataccatatttttgaaaaagccgtttctgtaatgaaggagaaaactcaccgaggcagttccataggatggcaagatcctggtatcggtctgcgattccgactcgtccaacatcaatacaacctattaatttcccctcgtcaaaaataaggttatcaagtgagaaatcaccatgagtgacgactgaatccggtgagaatggcaaaagtttatgcatttctttccagacttgttcaacaggccagccattacgctcgtcatcaaaatcactcgcatcaaccaaaccgttattcattcgtgattgcgcctgagcgagacgaaatacgcgatcgctgttaaaaggacaattacaaacaggaatcgaatgcaaccggcgcaggaacactgccagcgcatcaacaatattttcacctgaatcaggatattcttctaatacctggaatgctgtttttccggggatcgcagtggtgagtaaccatgcatcatcaggagtacggataaaatgcttgatggtcggaagaggcataaattccgtcagccagtttagtctgaccatctcatctgtaacatcattggcaacgctacctttgccatgtttcagaaacaactctggcgcatcgggcttcccatacaagcgatagattgtcgcacctgattgcccgacattatcgcgagcccatttatacccatataaatcagcatccatgttggaatttaatcgcggcctcgacgtttcccgttgaatatggctcataacaccccttgtattactgtttatgtaagcagacagttttattgttcatgatgatatatttttatcttgtgcaatgtaacatcagagattttgagacacgggccagagctgcatcgcgcgtttcggtgatgacggtgaaaacctctgacacatgcagctcccggagacggtcacagcttgtctgtaagcggatgccgggagcagacaagcccgtcagggcgcgtcagcgggtgttggcgggtgtcggggctggcttaactatgcggcatcagagcagattgtactgagagtgcaccatatgcggtgtgaaataccgcacagatgcgtaaggagaaaataccgcatcaggcgccattcgccattcaggctgcgcaactgttgggaagggcgatcggtgcgggcctcttcgctattacgccagctggcgaaagggggatgtgctgcaaggcgattaagttgggtaacgccagggttttcccagtcacgacgttgtaaaacgacggccagtgaattcgagctcggtacctcgcgaatgcatctagat

SEQ ID NO: 1859 - DNA, 6335 bp, Artificial Sequence
  construct 2/2 for ihol1: pGAL7 < GPD1
taactataacggtcctaaggtagcgaatatcaccaacgcccacggggttactggtgctggtattgttgctggcttgaaacaaggtgcgcaagaggtcaccaaagaaccaaggggattattgatgcttgctgaattgtcttccaagggttctctagcacacggtgaatatactaagggtaccgttgatattgcaaagagtgataaagatttcgttattgggttcattgctcagaacgatatgggaggaagagaagaagggtttgattggctaatcatgaccccaggtgtaggtttagacgacaaaggcgatgcattgggtcagcagtacagaaccgtcgacgaagttgtaagtggtggatcagatatcatcattgttggcagaggacttttcgccaagggtagagatcctaaggttgaaggtgaaagatacagaaatgctggatgggaagcgtaccaaaagagaatcagcgctccccattaattatacaggaaacttaatagaacaaatcacatatttaatctaatagccacctgcattggcacggtgcaacactacttcaacttcatcttacaaaaagatcacgtgatctgttgtattgaactgaaaattttttgtttgcttctctctctctctctttcattatgtgagatttaaaaaccagaaactacatcatcgatttgtaacgatttgggagtccagagactcgctgttttcgaaatttgccctcaagcgcgagtattgaaccaggcttacgcccaagaacgtagcaagctgactcaaacaaaatacattttgcccgcgttacatatgaatcaagttggaagttctcaggtaaggggctagtagatgcaatgaatgacgatgaagatagagcccaactgaaggctaggctgtggatccgtgtggaagaacgattacaacaggtgttgtcctctgaggacataaaatacacaccgagattcatcaactcattgctggagttagcatatctacaattgggtgaaatggggagcgatttgcaggcatttgctcggcatgccggtagaggtgtggtcaataagagcgacctcatgctatacctgagaaagcaacctgacctacaggaaagagttactcaagaataagaattttcgttttaaaacctaagagtcactttaaaatttgtatacacttattttttttataacttatttaataataaaaatcataaatcataagaaattcgcctaatcttcatgtagatctaattcttcaatcatgtccggcaggttcttcattgggtagttgttgtaaacgatttggtatacggcttcaaataatgggaagtcttcgacagagccacatgtttccaaccattcgtgaacttctttgcaggtaattaaaccttgagcggattggccattcaacaactccttttcacattcccaggcgtccttaccagaagtagccattagcctagcaaccttgacgtttctaccaccagcgcaggtggtgatcaaatcagcaacaccagcagactcttggtagtatgtttcttctctagattctgggaaaaacatttgaccgaatctgatgatctcacccaaaccgactctttggatggcagcagaagcgttgttaccccagcctagaccttcgacgaaaccacaacctaaggcaacaacgttcttcaaagcaccacagatggagataccagcaacatcttcgatgacactaacgtggaagtaaggtctgtggaacaaggcctttagaaccttatggtcgacgtccttgccctcgcctctgaaatcctttggaatgtggtaagcaactgttgtttcagaccagtgttcttgagcgacttcggtggcaatgttagcaccagatagagcaccacattgaatacctagttcctcagtgatgtaagaggatagcaattggacacctttagcaccaacttcaaaaccctttagacaggagatagctctgacgtgtgaatcaacatgacctttcaattggctacagatacggggcaaaaattgatgtggaatgttgaaaacgatgatgtcgacatccttgactgaatcaatcaagtctggattagcaaccaaattgtcgggtagagtgatgccaggcaagtatttcacgttttgatgtctagtatttatgatttcagtcaatttttcaccattgatctcttcttcgaacacccacatttgtactattggagcgaaaacttctgggtatcccttacaattttcggcaaccaccttggcaatagtagtaccccagttaccagatccaatcacagtaaccttgaaaggcttttcggcagccttcaaagaaacagaagaggaacttctctttctaccagcattcaagtggccggaagttaagtttaatctatcagcagcagcagacatttttgagggaatattcaactgtttttttttatcatgttgatgctctgcataataatgcccataaatatttccgacctgcttttatatctttgctagccaaactaactgaacatagctacacattattttcagcttggctattttgtgaacactgtatagccagtccttcggatcacggtcaacagttgtccgagcgctttttggaccctttcccttatttttgggttaaggaaaatgacagaaaatatatctaatgagccttcgctcaacagtgctccgaagtatagctttccaaaaggagaggcaaagcaatttaagaatgtatgaacaaaataaaggggaaaaattaccccctctactttaccaaacgaatactaccaataatatttacaacttttccttatgattttttcactgaagcgcttcgcaatagttgtgagtgatatcaaaagtaacgaaatgaactccgcggctcgtgctatattcttgttgctaccgtccatatctttccatagattttcaatttttgatgtctccatggtggtacagagaacttgtaaacaattcggtccctacatgtgaggaaattcgctgtgacacttttatcactgaactccaaatttaaaaaatagcataaaattcgttatacagcaaatctatgtgttgcaattaagaactaaaagatatagagtgcatattttcaagaaggatagtaagctggcaaagcagtaacgctcatcagcaaacgaaagagtttaaggctcgctaattcgcactgtcagggtcccttgggtgttttgcactagcgtcaggtaggctagtatgaatcgactaacacgcctgcctacgcaacactttagctgctttttttaagcagcggcagatgaggatttaaataacgcataaccaagaatatacctaatgaagtgaaggtatacaggctgttctatggacttgaataatactggctaccctggcgtcctaatgtcgttaagaaagtaacttgatatcagattaatcacaaacttggtccacaaaataccacttatctcatataatctaaatctgactaaagggtgtaggcacggaacttcggacctagaggtattgctcaatatgtatatttctcaatggttcatctaggtaagcaaggccttgaataatatacttaatcttgtctgtttcgcaacaattgctgagtacaataatgttggaataaaaatcaactatcatctactaactagtatttacgttactagtatattatcatatacggtgttagaagatgacgcaaatgatgagaaatagtcatctaaattagtggaagctgaaacgtagggataacagggtaatatcggatcccgggcccgtcgactgcagaggcctgcatgcaagcttggcgtaatcatggtcatagctgtttcctgtgtgaaattgttatccgctcacaattccacacaacatacgagccggaagcataaagtgtaaagcctggggtgcctaatgagtgagctaactcacattaattgcgttgcgctcactgcccgctttccagtcgggaaacctgtcgtgccagctgcattaatgaatcggccaacgcgcggggagaggcggtttgcgtattgggcgctcttccgcttcctcgctcactgactcgctgcgctcggtcgttcggctgcggcgagcggtatcagctcactcaaaggcggtaatacggttatccacagaatcaggggataacgcaggaaagaacatgtgagcaaaaggccagcaaaaggccaggaaccgtaaaaaggccgcgttgctggcgtttttccataggctccgcccccctgacgagcatcacaaaaatcgacgctcaagtcagaggtggcgaaacccgacaggactataaagataccaggcgtttccccctggaagctccctcgtgcgctctcctgttccgaccctgccgcttaccggatacctgtccgcctttctcccttcgggaagcgtggcgctttctcatagctcacgctgtaggtatctcagttcggtgtaggtcgttcgctccaagctgggctgtgtgcacgaaccccccgttcagcccgaccgctgcgccttatccggtaactatcgtcttgagtccaacccggtaagacacgacttatcgccactggcagcagccactggtaacaggattagcagagcgaggtatgtaggcggtgctacagagttcttgaagtggtggcctaactacggctacactagaagaacagtatttggtatctgcgctctgctgaagccagttaccttcggaaaaagagttggtagctcttgatccggcaaacaaaccaccgctggtagcggtggtttttttgtttgcaagcagcagattacgcgcagaaaaaaaggatctcaagaagatcctttgatcttttctacggggtctgacgctcagtggaacgaaaactcacgttaagggattttggtcatgagattatcaaaaaggatcttcacctagatccttttaaattaaaaatgaagttttaaatcaagcccaatctgaataatgttacaaccaattaaccaattctgattagaaaaactcatcgagcatcaaatgaaactgcaatttattcatatcaggattatcaataccatatttttgaaaaagccgtttctgtaatgaaggagaaaactcaccgaggcagttccataggatggcaagatcctggtatcggtctgcgattccgactcgtccaacatcaatacaacctattaatttcccctcgtcaaaaataaggttatcaagtgagaaatcaccatgagtgacgactgaatccggtgagaatggcaaaagtttatgcatttctttccagacttgttcaacaggccagccattacgctcgtcatcaaaatcactcgcatcaaccaaaccgttattcattcgtgattgcgcctgagcgagacgaaatacgcgatcgctgttaaaaggacaattacaaacaggaatcgaatgcaaccggcgcaggaacactgccagcgcatcaacaatattttcacctgaatcaggatattcttctaatacctggaatgctgtttttccggggatcgcagtggtgagtaaccatgcatcatcaggagtacggataaaatgcttgatggtcggaagaggcataaattccgtcagccagtttagtctgaccatctcatctgtaacatcattggcaacgctacctttgccatgtttcagaaacaactctggcgcatcgggcttcccatacaagcgatagattgtcgcacctgattgcccgacattatcgcgagcccatttatacccatataaatcagcatccatgttggaatttaatcgcggcctcgacgtttcccgttgaatatggctcataacaccccttgtattactgtttatgtaagcagacagttttattgttcatgatgatatatttttatcttgtgcaatgtaacatcagagattttgagacacgggccagagctgcatcgcgcgtttcggtgatgacggtgaaaacctctgacacatgcagctcccggagacggtcacagcttgtctgtaagcggatgccgggagcagacaagcccgtcagggcgcgtcagcgggtgttggcgggtgtcggggctggcttaactatgcggcatcagagcagattgtactgagagtgcaccatatgcggtgtgaaataccgcacagatgcgtaaggagaaaataccgcatcaggcgccattcgccattcaggctgcgcaactgttgggaagggcgatcggtgcgggcctcttcgctattacgccagctggcgaaagggggatgtgctgcaaggcgattaagttgggtaacgccagggttttcccagtcacgacgttgtaaaacgacggccagtgaattcgagctcggtacctcgcgaatgcatctagat
